(19) United States
(12) Patent Application Publication
(10) Pub. No.: US 2019/0300967 A1
(43) Pub. Date: Oct. 3, 2019

(54) COMPOSITIONS AND METHODS FOR PREDICTING RESPONSE AND RESISTANCE TO CTLA4 BLOCKADE IN MELANOMA USING A GENE EXPRESSION SIGNATURE

(71) Applicant: DANA-FARBER CANCER INSTITUTE, INC., Boston, MA (US)

(72) Inventors: Pavan Bachireddy, Boston, MA (US); Sachet A. Shukla, Natick, MA (US); Catherine J. Wu, Brookline, MA (US)

(73) Assignee: DANA-FARBER CANCER INSTITUTE, INC., Boston, MA (US)

(21) Appl. No.: 16/340,969

(22) PCT Filed: Oct. 13, 2017
(86) PCT No.: PCT/US2017/056599

§ 371 Date: Apr. 10, 2019

Related U.S. Application Data
(60) Provisional application No. 62/407,591, filed on Oct. 13, 2016.
(60) Provisional application No. 62/565,411, filed on Sep. 29, 2017.

(51) Int. Cl. C12Q 1/6886; C07K 16/28; A61P 35/00

(52) U.S. Cl. CPC C12Q 1/6886; C07K 16/2818; A61P 35/00; A61K 2039/505; C12Q 2600/158; C12Q 2600/154; C07K 2317/76; C12Q 2600/106

(57) ABSTRACT

The present invention relates to compositions and methods for predicting response and resistance to CTA4 blockade in melanoma.

### RELATED APPLICATIONS

[0001] This application claims the benefit of priority under 35 U.S.C. § 119(e) to U.S. Provisional Application No. 62/407,591, filed Oct. 13, 2016, and to U.S. Provisional Application No. 62/565,411, filed Sep. 29, 2017, each of which is incorporated herein by reference in its entirety.

### GOVERNMENT LICENSE RIGHTS

[0002] This invention was made with government support under grant number 1R01CA182461-01 awarded by the National Cancer Institute, under grant number 1R01CA184922-02 awarded by the National Cancer Institute, under grant number R50RCA211482A awarded by the National Cancer Institute, and under grant number 1R01CA155010-05 awarded by the National Cancer Institute. The government has certain rights in the invention.

### BACKGROUND OF THE INVENTION

[0003] Cytotoxic T-lymphocyte-associated protein 4 (CTLA4) blockade can induce durable clinical remissions in a minority of patients with metastatic melanoma. However, prior to the invention described herein, molecular signatures precisely predicting response and resistance to CTLA4 blockade were unknown. As such, there is a pressing need to identify more effective methods for predicting response or resistance to CTLA4 blockade.

### SUMMARY OF THE INVENTION

[0004] The invention is based, at least in part, upon the identification of a gene expression signature that discriminates clinical outcomes of CTLA4 blockade. Specifically, described herein is a specific cluster of cancer-testis antigens and microRNA-211 that are predictive of resistance and response, respectively, to ipilimumab in melanoma. In some aspects, the invention relates to methods, arrays, and kits for diagnosing, monitoring, and treating melanoma.

[0005] As described in detail below, in one aspect, the invention is a gene expression signature that predicts clinical response and resistance to CTLA4 blockade, e.g., ipilimumab, in patients with metastatic melanoma.

[0006] In one aspect, increased expression of at least one of the following genes significantly correlates with resistance to ipilimumab: MAGEA2, CSAG4, MAGEA2B, AC093787 (RP11-215P9), MAGEA12, CSAG1, GABRA3, CSAG3, makorin ring finger protein 9 (MKRN9P), keratin 8 pseudogene 8 (KRT8P8), MAGEA6, EYA1, CSAG2, RP11-379D21.3, MAGE family member C1 (MAGEC1), RP1-273G13.1, MAGEA3, miR-218-1, pregnancy specific beta-1-glycoprotein 11 (PSG11), X-inactive specific transcript (XIST), RP11-360D2.1, pregnancy specific beta-1-glycoprotein 10 pseudogene (PSG10P), miR-1262, tachykinin 3 (TAC3), PSG8, heat shock protein family B (small) member 3 (HSPB3), gap junction protein beta-6 (GJB6), GABRQ, MAGEA1, MAGEA11, MAGEA9B, and PSG6.

[0007] A cluster of CT antigen genes on the Xq28 cytoband (i.e., MAGEA2, CSAG4, MAGEA2B, MAGEA12, CSAG1, CSAG3, MAGEA6, CSAG2, MAGEA3) correlate with resistance to ipilimumab. Additionally, miR-211 and transient receptor potential cation channel subfamily M member 1 (TRPM1) (which subsumes miR-211) correlate with response to ipilimumab.

[0008] Also provided is a gene expression signature that predicts clinical response and resistance to a combination of an agonist of an HMGB1 pathway, HMGB1 receptor (henceforth “HMGB1 agonist”)(e.g., toll-like receptor (TLR) agonists); or agonist of autophagy (e.g., metformin, temozolomide, trifluoperazine, divalproex sodium, vorinostat, rapamycin, everolimus, MG-132, doxorubicin, ABT-737, BCL2 inhibitors/antagonists, gemcitabine, torin 1, resveratrol, etc); or an agonist of miR-211, miR-185 and/or miR-513A2; or Xq28-CGA antagonist and CTLA4 blockade, e.g., ipilimumab or tremelimumab, in patients with melanoma, e.g., metastatic melanoma. Specifically, increased expression of at least one of the following genes significantly correlates with benefit to treatment with a TLR agonist (or autophagy agonist or Xq28-CGA antagonist) and ipilimumab: MAGEA2, MAGE2AB, MAGEA3, MAGEA6, MAGEA12, CSAG1, CSAG2, and CSAG3. For example, the Xq28-CGA inhibitor comprises an antibody, an aptamer, or a small molecule. Additionally, decreased expression of at least one of these genes significantly correlates with benefit to treatment with an agonist of miR-211, miR-185 and/or miR-513A2. For example, the miR agonist comprises a miR mimetic (natural or synthetic) or an aptamer.

[0009] Accordingly, provided is a method of determining whether inhibition of cytotoxic T-lymphocyte-associated protein 4 (CTLA4) in a subject, e.g., a human subject, with melanoma will result in clinical benefit (e.g., inhibition of melanoma cancer cells) in the subject, comprising: obtaining a test sample from a subject having or at risk of developing melanoma; determining the expression level of at least one melanoma-associated gene in the test sample; comparing the expression level of the melanoma-associated gene in the test sample with the expression level of the melanoma-associated gene in a reference sample; and determining whether CTLA4 blockade will inhibit melanoma in the subject if the expression level of the melanoma-associated gene in the test sample is differentially expressed as compared to the level of the melanoma-associated gene in the reference sample.

[0010] Also provided is a method of treating cancer comprising administering an effective amount of a CTLA4 inhibitor and an effective amount of an HMGB1 agonist or autophagy agonist or Xq28-CGA antagonist. For example, the CTLA4 inhibitor comprises ipilumamab. In another example, the HMGB1 agonist comprises high mobility group box 1 (HMGB1), TLR agonists like unmethylated CpG DNA (e.g., CpG-oligodeoxynucleotides or CpG-ODN), Hiltonol (poly-ICLC), Bacillus Calmette-Guérin (BCG), monophosphoryl lipid A (MPL), imiquimod, etc. In other example, the agonist of autophagy comprises inducers of autophagy, e.g., metformin, temozolomide, trifluoperazine, divalproex sodium, vorinostat, mTOR inhibitors (e.g., rapamycin, everolimus), MG-132, doxorubicin, ABT-737, BCL2 inhibitors/antagonists, gemcitabine, torin 1, resveratrol, etc. In other example, the agonist of miR-211, miR-185 and/or miR-513A2 comprises a miR mimetic (synthetic or natural) or an aptamer.

[0011] Also provided are methods of determining whether administration of a CTLA4 inhibitor and an HMGB1 agonist to a subject with melanoma will result in clinical benefit in the subject comprising obtaining a test sample from a subject having or at risk of developing melanoma; determining the expression level of at least one melanoma-associated gene in the test sample; comparing the expression level of the melanoma-associated gene in the test sample with the expression level of the melanoma-associated gene in a reference sample; and determining whether administration of a CTLA4 inhibitor and an HMGB1 agonist will inhibit melanoma in the subject if the expression level of the melanoma-associated gene in the test sample is differentially expressed as compared to the level of the melanoma-associated gene in the reference sample.

[0012] For example, the test sample is obtained from the melanoma, wherein the melanoma-associated gene comprises a cancer germline antigen (CGA) gene; and determining that administration of the CTLA4 inhibitor and the HMGB1 agonist in a subject with melanoma will result in clinical benefit in the subject if the expression level of the CGA gene in the test sample is higher than the level of the CGA gene in the reference sample.

[0013] In one aspect, the CGA gene comprises MAGEA2, MAGEA3, MAGEA6, MAGEA12, CSAG1, CSAG2, or CSAG3.

[0014] Alternatively, the expression level of the melanoma-associated gene in the test sample is compared with a threshold expression level of the melanoma-associated gene (e.g., a “cut-off level”). The method involves determining whether CTLA4 blockade will inhibit melanoma in the subject if the expression level of the melanoma-associated gene in the test sample is differentially expressed as compared to the threshold expression level of the melanoma-associated gene.

[0015] In another case, the expression level of the melanoma-associated gene in the test sample is compared with an expression level of a housekeeping gene within the test sample. The method involves determining whether CTLA4 blockade will inhibit melanoma in the subject if the expression level of the melanoma-associated gene in the test sample is differentially expressed as compared to the expression level of the housekeeping gene. For example, clinical benefit in the subject comprises complete or partial response or stable disease with overall survival of greater than one year as defined by response evaluation criteria in solid tumors (RECIST). In some cases, clinical benefit is associated with an inhibition of melanoma cells. By contrast, the absence of clinical benefit (i.e., no clinical benefit) in the subject comprises progressive disease or stable disease with overall survival of less than one year as defined by RECIST. Alternatively or in addition to using RECIST, clinical benefit in the subject is evaluated using immune-related response criteria (irRC). For example, clinical benefit comprises long-term survival in spite of disease progression or response defined by irRC criteria

[0016] The expression level of the melanoma-associated gene in the test sample is differentially expressed as compared to the level of the melanoma-associated gene in the reference sample, the threshold expression level, or the expression level of a housekeeping gene. For example, the expression level of the melanoma-associated gene in the test sample is upregulated (i.e., increased) by at least 2 fold, at least 3 fold, at least 4 fold, at least 5 fold, at least 6 fold, at least 7 fold, at least 8 fold, at least 9 fold, at least 10 fold, at least 15 fold, at least 20 fold, at least 25 fold, at least 30 fold, at least 35 fold, at least 40 fold, at least 45 fold, at least 50 fold, at least 60 fold, at least 70 fold, at least 80 fold, at least 90 fold, at least 100 fold, at least 125 fold, at least 150 fold, at least 175 fold, at least 200 fold, at least 250 fold, at least 300 fold, at least 350 fold, at least 400 fold, at least 500 fold, at least 600 fold, at least 700 fold or at least 800 fold as compared to the level of the melanoma-associated gene in the reference sample, the threshold expression level, or the expression level of a housekeeping gene.

[0017] Alternatively, the expression level of the melanoma-associated gene in the test sample is downregulated (i.e., decreased) by at least 2 fold, at least 3 fold, at least 4 fold, at least 5 fold, at least 6 fold, at least 7 fold, at least 8 fold, at least 9 fold, at least 10 fold, at least 15 fold, at least 20 fold, at least 25 fold, at least 30 fold, at least 35 fold, at least 40 fold, at least 45 fold, at least 50 fold, at least 60 fold, at least 70 fold, at least 80 fold, at least 90 fold, at least 100 fold, at least 125 fold, at least 150 fold, at least 175 fold, at least 200 fold, at least 250 fold, at least 300 fold, at least 350 fold, at least 400 fold, at least 500 fold, at least 600 fold, at least 700 fold or at least 800 fold as compared to the level of the melanoma-associated gene in the reference sample, the threshold expression level, or the expression level of a housekeeping gene.

[0018] In one aspect, the test sample is obtained from the melanoma tissue, from the tumor microenvironment, or from tumor-infiltrating immune cells. For example, the test sample is obtained from the melanoma and the melanoma-associated gene comprises a gene on chromosome Xq28. For example, the melanoma-associated gene comprises a cancer germline antigen (CGA) gene (i.e., a cancer-testis (CT) antigen gene); and the method involves determining that inhibition of CTLA4 in a subject with melanoma will not result in clinical benefit in the subject if the expression level of the CGA gene in the test sample is higher than the level of the CGA gene in the reference sample. Exemplary CGA genes include melanoma-associated antigen 2 (MAGEA2), MAGEA3, MAGEA6, MAGEA12, chondrosarcoma associated gene 1 (CSAG1), CSAG2, CSAG3, and CSAG4.

[0019] Optionally, the melanoma-associated gene is hypomethylated, e.g., there is a decrease in the epigenetic methylation of cytosine residues in CpG dinucleotides deoxyribonucleic acid (DNA) in the promoter and/or a change in epigenetic methylation of cytosine residues in CpG dinucleotides in the gene body. For example, a CGA gene is hypomethylated in the promoter. For example, local hypomethylation of the Xq28 MAGE genes described herein, e.g., MAGEA2, MAGEA3, MAGEA6, or MAGEA12, is identified. Alternatively, or in addition, global hypomethylation of the genes in the test sample is identified. As described herein, hypomethylation of genes is an indication that inhibition of CTLA4 in a subject with melanoma will not result in clinical benefit in the subject.

[0020] Optionally, the melanoma-associated gene is hypermethylated, e.g., there is an increase in the epigenetic methylation of cytosine residues in CpG dinucleotides deoxyribonucleic acid (DNA) in the promoter and/or a change in epigenetic methylation of cytosine residues in CpG dinucleotides in the gene body. For example, a CGA gene is hypermethylated in the promoter. For example, local hypermethylation of the Xq28 MAGE genes described herein is identified. Alternatively, or in addition, global hypermethylation of the genes in the test sample is identified. As described herein, hypermethylation of genes is an indication that inhibition of CTLA4 in a subject with melanoma will result in clinical benefit in the subject.

[0021] Alternatively, the test sample is obtained from the melanoma and the melanoma-associated gene comprises a pregnancy-specific glycoprotein (PSG) gene, a γ-aminobutyric acid (GABA) A receptor gene, an epithelial-to-mesenchymal transition gene, an embryonic development/differentiation gene, an angiogenesis gene, or an extracellular matrix (ECM) gene; and the method involves determining that inhibition of CTLA4 in a subject with melanoma will not result in clinical benefit in the subject if the expression level of the PSG gene, GABA A receptor gene, epithelial-to-mesenchymal transition gene, embryonic development/differentiation gene, angiogenesis gene, or extracellular matrix gene in the test sample is higher than the level of the respective gene in the reference sample.

[0022] Exemplary PSG genes include PSG1, PSG2, PSG4, PSG5, PSG6, PSG7, PSG8, PSG9, and PSG11. In some cases, the PSG gene is hypomethylated. Suitable GABA A receptor genes include gamma-aminobutyric acid type A receptor alpha 3 subunit (GABRA3), gamma-aminobutyric acid type A receptor beta 1 subunit (GABRB1), GABRB2, gamma-aminobutyric acid type A receptor gamma 2 subunit (GABRG2), gamma-aminobutyric acid type A receptor theta subunit (GABRQ), gamma-aminobutyric acid type A receptor rho 1 subunit (GABRR1). In one aspect, the epithelial-to-mesenchymal transition gene comprises claudin 1 (CLDN1), CLDN2, eyes absent homolog 1 (EYA1), snail family zinc finger 1 (SNAI1), transforming growth factor beta 2 (TGFB2), or wingless-type MMTV integration site family member 3 (WNT3). Exemplary embryonic development/differentiation genes include homeobox D13 (HOXD13), HOXD11, HOXA2, HOXA5, and HOXD10. In some cases, the angiogenesis gene comprises angiopoietin 1 (ANGPT1), angiopoietin-2 (ANG2), or platelet derived growth factor subunit A (PDGFA). Suitable ECM genes include protocadherin beta 2 (PCDHB2), PCDHB3, PCDHB6, PCDHB10, protocadherin gamma subfamily A3, (PCDHGA3), PCDHGB1, PCDHGB2, elastin microfibril interfacer 1 (EMILIN1), and tenascin N (TNN).

[0023] In other cases, the test sample is obtained from the melanoma, and the melanoma-associated gene comprises micro ribonucleic acid-211 (miR-211), miR-513A2, or miR-185. It is determined that inhibition of CTLA4 in a subject with melanoma will result in clinical benefit in the subject if the expression level of miR-211, miR-513A2, or miR-185 in the test sample is higher than the level of miR-211, miR-513A2, or miR-185, respectively, in the reference sample.

[0024] In other cases, the test sample is obtained from the melanoma, and the melanoma-associated gene comprises melastatin-1 (TRPM1). It is determined that inhibition of CTLA4 in a subject with melanoma will result in clinical benefit in the subject if the expression level of TRPM1 in the test sample is higher than the level of TRPM1 in the reference sample.

[0025] In one aspect, the test sample is obtained from the melanoma and the melanoma-associated gene comprises miR-211, cluster of differentiation 5 molecule like (CD5L), interleukin 12 receptor subunit beta 2 (IL12RB2), fas apoptotic inhibitory molecule 3 (FAIM3), and/or pre T-Cell antigen receptor alpha (PTCRA). It is determined that inhibition of CTLA4 in a subject with melanoma will result in clinical benefit in the subject if the expression level of miR-211, CD5L, IL12RB2, FAIM3, and PTCRA in the test sample is higher than the level of the corresponding gene in the reference sample.

[0026] In another aspect, the test sample is obtained from the melanoma, and the melanoma-associated gene comprises miR-211, MAGEA2, MAGEA3, MAGEA6, MAGEA12, CSAG1, CSAG2, CSAG3, or CSAG4. It is determined that inhibition of CTLA4 in a subject with melanoma will not result in clinical benefit in the subject if the expression level of miR-211 in the test sample is lower than the level of miR-211 in the reference sample and if the expression level of MAGEA2, MAGEA3, MAGEA6, MAGEA12, CSAG1, CSAG2, CSAG3, and CSAG4 in the test sample is higher than the level of the corresponding gene in the reference sample.

[0027] Alternatively, the test sample is obtained from a melanoma or the infiltrating immune cells, wherein the melanoma-associated gene comprises a T cell infiltration-associated gene, a receptor signaling gene, an activation gene, a cytotoxicity gene, a humoral immunity gene, and/or an immune inhibitory receptor gene. It is determined whether inhibition of CTLA4 in a subject with melanoma will result in clinical benefit in the subject if the expression level of the T cell infiltration-associated gene, receptor signaling gene, activation gene, or cytotoxicity gene in the test sample is higher than the level of the corresponding gene in the reference sample.

[0028] Suitable T cell infiltration-associated genes include cluster of differentiation 2 (CD2), CD6, and C-X-C motif chemokine ligand 13 (CXCL13). Exemplary receptor signaling genes include CD3D, CD3E, CD3G, lymphocyte-specific protein tyrosine kinase (LCK), T cell receptor alpha gene, T cell receptor beta gene, and PTCRA. Suitable activation genes include CD28, inducible t-cell co-stimulator (ICOS), eomesodermin (EOMES), interleukin-2 receptor subunit beta (IL2RB), Fas ligand (FASLG), and signaling lymphocytic activation molecule family member 6 (SLAMF6). In one aspect, cytotoxicity genes include granulysin (GNLY), granzyme A (GZMA), GZMB, GZMH, GZMK, and perforin 1 (PRF1). Suitable humoral immunity genes include CD19, CD72, Fc receptor-like protein 1/3 (FCRL1/3), and membrane spanning 4-domains A1 (MS4A1).

[0029] In some cases, immune inhibitory receptors include a receptor specific to or preferentially expressed by T cells such as CTLA4 and lymphocyte-activation gene-3 (LAG3). Alternatively, the immune inhibitory receptor comprises a receptor specific to or preferentially expressed by B cells such as CTLA4, FCRL1, and FCRL3. In other cases, the immune inhibitory receptor comprises a receptor specific to or preferentially expressed by macrophages such as CD5L. In other aspects, the immune inhibitory receptor comprises a receptor specific to or preferentially expressed by eosinophils/mast cells such as sialic acid-binding Ig-like lectin 8 (SIGLEC8). Alternatively, the immune inhibitory receptor comprises fas apoptotic inhibitory molecule 3 (FAIM3/TOSO).

[0030] In one aspect, the test sample is obtained from the melanoma and the melanoma-associated gene comprises CD2, CD6, CXCL13, CD3D, CD3E, CD3G, LCK, T cell receptor alpha gene, T cell receptor beta gene, CD28, ICOS, EOMES, IL2RB, FASLG, SLAMF6, GNLY, GZMA, GZMB, GZMH, GZMK, PRF1, PTCRA, CD19, CD72, FCRL1/3, MS4A1, CTLA4, LAG3, FCRL1, FCRL3, CD5L, SIGLEC8, and/or FAIM3/TOSO (or any combination thereof). It is determined that inhibition of CTLA4 in a subject with melanoma will result in clinical benefit in the subject if the expression level of CD2, CD6, CXCL13, CD3D, CD3E, CD3G, LCK, T cell receptor alpha gene, T cell receptor beta gene, CD28, ICOS, EOMES, IL2RB, FASLG, SLAMF6, GNLY, GZMA, GZMB, GZMH, GZMK, PRF1, PTCRA, CD19, CD72, FCRL1/3, MS4A1, CTLA4, LAG3, FCRL1, FCRL3, CD5L, SIGLEC8, and/or FAIM3/TOSO (or any combination thereof) in the test sample is higher than the level of the corresponding gene in the reference sample.

[0031] Alternatively, the test sample is obtained from the melanoma and the melanoma-associated gene comprises miR-211, along with one or more of CD2, CD6, CXCL13, CD3D, CD3E, CD3G, LCK, T cell receptor alpha gene, T cell receptor beta gene, CD28, ICOS, EOMES, IL2RB, FASLG, SLAMF6, GNLY, GZMA, GZMB, GZMH, GZMK, PRF1, PTCRA, CD19, CD72, FCRL1/3, MS4A1, CTLA4, LAG3, FCRL1, FCRL3, CD5L, SIGLEC8, and/or FAIM3/TOSO (or any combination thereof). It is determined that inhibition of CTLA4 in a subject with melanoma will result in clinical benefit in the subject if the expression level of miR-211, along with one or more of CD2, CD6, CXCL13, CD3D, CD3E, CD3G, LCK, T cell receptor alpha gene, T cell receptor beta gene, CD28, ICOS, EOMES, IL2RB, FASLG, SLAMF6, GNLY, GZMA, GZMB, GZMH, GZMK, PRF1, PTCRA, CD19, CD72, FCRL1/3, MS4A1, CTLA4, LAG3, FCRL1, FCRL3, CD5L, SIGLEC8, and/or FAIM3/TOSO (or any combination thereof) in the test sample is higher than the level of the corresponding gene in the reference sample.

[0032] Suitable samples include those with deoxyribonucleic acid (DNA) or ribonucleic acid (RNA) therein. For example, the sample is a tumor sample. In anther aspect, the sample is a tumor microenvironment sample. Optionally, the sample is a plasma sample or a blood sample. In some cases, the sample comprises one or more circulating tumor cells.

[0033] In some cases, the reference sample is obtained from healthy normal tissue, melanoma that received a clinical benefit from CTLA4 inhibition, or melanoma that did not receive a clinical benefit from CTLA4 inhibition.

[0034] Optionally, the expression level of the melanoma-associated gene is detected via an Affymetrix Gene Array hybridization, next-generation sequencing, ribonucleic acid sequencing (RNA-seq), a real time reverse transcriptase polymerase chain reaction (real time RT-PCR) assay, immunohistochemistry (IHC), immunofluorescence, or methylation-specific PCR.

[0035] In one aspect, the expression level of the melanoma-associated gene is detected via RNA-seq and the reference sample is obtained from healthy normal tissue from the same individual as the test sample or one or more healthy normal tissues from different individuals.

[0036] In other cases, the expression level of the melanoma-associated gene is detected via RT-PCR and the reference sample is obtained from the same tissue as the test sample. In this case, levels of a housekeeping gene are determined in the reference sample. Suitable housekeeping genes include glyceraldehyde 3-phosphate dehydrogenase (GAPDH), hypoxanthine phosphoribosyltransferase 1 (HPRT1), and serine/threonine protein kinase (PSK1). The method involves determining whether CTLA4 blockade will inhibit melanoma in the subject if the expression level of the melanoma-associated gene in the test sample is differentially expressed as compared to the expression level of the housekeeping gene.

[0037] The methods described herein optionally further comprise treating the subject with a chemotherapeutic agent, radiation therapy, cryotherapy, or hormone therapy. Exemplary chemotherapeutic agents include dacarbazine, temozolomide, nab-paclitaxel, paclitaxel, cisplatin, or carboplatin.

[0038] In some cases, the methods described herein further comprise administering an inhibitor of the melanoma-associated gene with a higher level of expression compared to the level of the melanoma-associated gene in the reference sample, thereby treating the melanoma. Suitable inhibitors include a small molecule inhibitor, RNA interference (RNAi), an antibody, an antibody fragment, an antibody drug conjugate, an aptamer, a chimeric antigen receptor (CAR), a T cell receptor, or any combination thereof.

[0039] In some cases, the antibody or antibody fragment is partially humanized, fully humanized, or chimeric. For example, the antibody fragment is a nanobody, an Fab, an Fab′, an (Fab′)2, an Fv, a single-chain variable fragment (ScFv), a diabody, a triabody, a tetrabody, a Bis-scFv, a minibody, an Fab2, an Fab3 fragment, or any combination thereof.

[0040] Alternatively, the methods described herein further comprise administering an agonist of the melanoma-associated gene with a higher level of expression compared to the level of the melanoma-associated gene in the reference sample, thereby treating the melanoma.

[0041] Optionally, the methods include administering to the subject a CTLA4 inhibitor, thereby treating the melanoma. For example, the CTLA4 inhibitor is an anti-CTLA4 antibody, e.g., ipilimumab or tremelimumab.

[0042] Also provided are compositions for predicting no clinical benefit in response to CTLA4 therapy comprising a melanoma-associated gene. For example, the melanoma-associated gene comprises MAGEA2, MAGEA3, MAGEA6, MAGEA12, CSAG1, CSAG2, CSAG3, or CSAG4 synthesized complementary deoxyribonucleic acid (cDNA).

[0043] In some cases, the composition further comprises PSG1, PSG2, PSG4, PSG5, PSG6, GABRA3, GABRB1, GABRB2, GABRG2, GABRQ, GABRR1, CLDN1, CLDN2, EYA1, SNAI1, TGFB2, WNT3, HOXD13, HOXD11, HOXA2, HOXA5, HOXD10, ANGPT1, ANG2, PDGFA, PCDHB2, PCDHB3, PCDHB6, PCDHB10, PCDHGA3, PCDHGB1, PCDHGB2, EMILIN1, and/or TNN synthesized cDNA.

[0044] Also provided are compositions for predicting clinical benefit in response to CTLA4 therapy comprising miR-211 and a melanoma-associated gene selected from the group consisting of CD5L, IL12RB2, FAIM3, PTCRA, CD2, CD6, CXCL13, CD3D, CD3E, CD3G, LCK, T cell receptor alpha gene, T cell receptor beta gene, GNLY, GZMA, GZMB, GZMH, GZMK, PRF1, CD19, CD72, FCRL1/3, MS4A1, CTLA4, LAG3, FCRL1, FCRL3, SIGLEC8, and FAIM3/TOSO synthesized cDNA.

[0045] In one aspect, the melanoma-associated gene is immobilized on a solid support. Optionally, the melanoma-associated gene is linked to a detectable label. Exemplary detectable labels include a fluorescent label, a luminescent label, a chemiluminescent label, a radiolabel, a SYBR Green label, and a Cy3-label.

[0046] Preferably, the compositions comprising melanoma-associated genes include synthetic or non-naturally occurring melanoma-associated genes.

[0047] Provided is a method of treating cancer in a subject in need thereof, comprising: administering a therapeutically effective amount of one or more CTLA4 inhibitor agents to the subject, wherein the subject is identified as (a) not having aberrant expression of at least one resistant cancer-associated gene or miRNA, or (b) having aberrant expression of at least one beneficial cancer-associated gene or miRNA.

[0048] Also provided is a method of treating cancer in a subject in need thereof, comprising: (a) analyzing a biological sample from the subject for: (i) aberrant expression of at least one resistant cancer-associated gene or miRNA, wherein the aberrant expression of the at least one resistant cancer-associated gene or miRNA is not present in the biological sample, or (ii) aberrant expression of at least one beneficial cancer-associated gene or miRNA, wherein the aberrant expression of the at least one beneficial cancer-associated gene or miRNA is present in the biological sample; (b) identifying the subject as a candidate for receiving one or more CTLA4 inhibitor agents; and (c) administering a therapeutically effective amount of the one or more CTLA4 inhibitor agents to the subject.

[0049] The invention provides a method of identifying a subject with cancer as a candidate for receiving one or more CTLA4 inhibitor agents, comprising: (a) analyzing a biological sample from the subject for: (i) aberrant expression of at least one resistant cancer-associated gene or miRNA, wherein the aberrant expression of the at least one resistant cancer-associated gene or miRNA is not present in the biological sample, or (ii) aberrant expression of at least one beneficial cancer-associated gene or miRNA, wherein the aberrant expression of the at least one beneficial cancer-associated gene or miRNA is present in the biological sample; and (b) identifying the subject as a candidate for receiving one or more ctla4 inhibitor agents.

[0050] Also provided is a method to predict a response of a subject with cancer to a CTLA4 therapy, the method comprising: (a) assaying for (i) aberrant expression of at least one resistant cancer-associated gene or miRNA in a biological sample from the subject, wherein the aberrant expression of the at least one resistant cancer-associated gene or miRNA is not present in the biological sample, or (ii) aberrant expression of at least one beneficial cancer-associated gene or miRNA in a biological sample from the subject, wherein the aberrant expression of the at least one beneficial cancer-associated gene or miRNA is present in the biological sample; and (b) predicting a response of the subject with cancer to a CTLA4 therapy to be positive based on the assaying.

[0051] Described herein is a method of treating cancer comprising administering an effective amount of a CTLA4 inhibitor and an effective amount of an agonist (or inducer) of autophagy. For example, the CTLA4 inhibitor comprises ipilimumab or tremelimumab. In some cases, the autophagy agonist comprises metformin, temozolomide, trifluoperazine, divalproex sodium, vorinostat, rapamycin, everolimus, MG-132, doxorubicin, ABT-737, BCL2 inhibitors/antagonists, gemcitabine, torin 1, or resveratrol, etc.

[0052] Also provided herein are methods of determining whether administration of a CTLA4 inhibitor and an autophagy agonist to a subject with melanoma will result in clinical benefit in the subject comprising obtaining a test sample from a subject having or at risk of developing melanoma; determining the expression level of at least one melanoma-associated gene in the test sample; comparing the expression level of the melanoma-associated gene in the test sample with the expression level of the melanoma-associated gene in a reference sample; and determining whether administration of a CTLA4 inhibitor and an autophagy agonist will inhibit melanoma in the subject if the expression level of the melanoma-associated gene in the test sample is differentially expressed as compared to the level of the melanoma-associated gene in the reference sample. For example, the autophagy agonist comprises metformin, temozolomide, trifluoperazine, divalproex sodium, vorinostat, rapamycin, everolimus, MG-132, doxorubicin, ABT-737, BCL2 inhibitors/antagonists, gemcitabine, torin 1, or resveratrol, etc.

[0053] In some cases, the test sample is obtained from the melanoma, wherein the melanoma-associated gene comprises a cancer germline antigen (CGA) gene; and the method comprises determining that administration of the CTLA4 inhibitor and the autophagy agonist in a subject with melanoma will result in clinical benefit in the subject if the expression level of the CGA gene in the test sample is higher than the level of the CGA gene in the reference sample. For example, the CGA gene comprises MAGEA2, MAGEA3, MAGEA6, MAGEA12, CSAG1, CSAG2, or CSAG3.

[0054] Also provided are methods of treating cancer comprising administering an effective amount of a CTLA4 inhibitor and an effective amount of a agonist (or inducer) of miR-211, miR-185 and/or miR-513A2. For example, the CTLA4 inhibitor comprises ipilimumab or tremelimumab. In some cases, the agonist of miR-211, miR-185 and/or miR-513A2 comprises a miR mimetic (natural or synthetic) or aptamer.

[0055] Also provided are methods of determining whether administration of a CTLA4 inhibitor and a miR-211, miR-185, or miR-513A2) agonist to a subject with melanoma will result in clinical benefit in the subject comprising: obtaining a test sample from a subject having or at risk of developing melanoma; determining the expression level of at least one melanoma-associated gene in the test sample; comparing the expression level of the melanoma-associated gene in the test sample with the expression level of the melanoma-associated gene in a reference sample; and determining whether administration of a CTLA4 inhibitor and an miR-211, miR-185 and/or miR-513A2 agonist will inhibit melanoma in the subject if the expression level of the melanoma-associated gene in the test sample is differentially expressed as compared to the level of the melanoma-associated gene in the reference sample. For example, the miR-211, miR-185 and/or miR-513A2 agonist comprises a miR mimetic (natural or synthetic) or aptamer.

[0056] In some cases, the test sample is obtained from the melanoma, wherein the melanoma-associated gene comprises a micro RNA gene; and determining that administration of the CTLA4 inhibitor and the miR-211, miR-185, and/or miR-513A2 agonist in a subject with melanoma will result in clinical benefit in the subject if the expression level of the miR-211, miR-513A2, or miR-185 in the test sample is higher than the level of the miR-211, miR-185 and/or miR-513A2 in the reference sample.

[0057] In other cases, the test sample is obtained from the melanoma, wherein the melanoma-associated gene comprises a melastatin-1 (TRPM1) gene; and determining that administration of the CTLA4 inhibitor and the miR-211, miR-185, and/or miR-513A2 agonist in a subject with melanoma will result in clinical benefit in the subject if the expression level of the TRPM1 gene in the test sample is higher than the level of the TRPM1 gene in the reference sample.

[0058] Provided herein are kits comprising reagents for assaying a biological sample from a subject with cancer for: (a) aberrant expression of at least one resistant cancer-associated gene or miRNA, or (b) aberrant expression of at least one beneficial cancer-associated gene or miRNA.

[0059] In one aspect, the aberrant expression of the at least one resistant cancer-associated gene or miRNA comprises overexpression of the at least one resistant cancer-associated gene or miRNA.

[0060] In another aspect, the aberrant expression of the at least one resistant cancer-associated gene is characterized by expression from a hypomethylated form of the at least one resistant cancer-associated gene.

[0061] In some cases, the aberrant expression of at least one beneficial cancer-associated gene or miRNA comprises overexpression of the at least one beneficial cancer-associated gene or miRNA.

### Definitions

[0062] Unless specifically stated or obvious from context, as used herein, the term “about” is understood as within a range of normal tolerance in the art, for example within 2 standard deviations of the mean. “About” can be understood as within 10%, 9%, 8%, 7%, 6%, 5%, 4%, 3%, 2%, 1%, 0.5%, 0.1%, 0.05%, or 0.01% of the stated value. Unless otherwise clear from context, all numerical values provided herein are modified by the term “about.”

[0063] The phrase “aberrant expression” is used to refer to an expression level that deviates from (i.e., an increased or decreased expression level) the normal reference expression level of the gene.

[0064] The term “antineoplastic agent” is used herein to refer to agents that have the functional property of inhibiting a development or progression of a neoplasm in a human, e.g., a melanoma. Inhibition of metastasis is frequently a property of antineoplastic agents.

[0065] By “agent” is meant any small compound, antibody, nucleic acid molecule, or polypeptide, or fragments thereof.

[0066] By “alteration” is meant a change (increase or decrease) in the expression levels or activity of a gene or polypeptide as detected by standard art-known methods such as those described herein. As used herein, an alteration includes at least a 1% change in expression levels, e.g., at least a 2%, 3%, 4%, 5%, 6%, 7%, 8%, 9%, 10%, 20%, 30%, 40%, 50%, 60%, 70%, 80%, 90%, or 100% change in expression levels. For example, an alteration includes at least a 5%-10% change in expression levels, preferably a 25% change, more preferably a 40% change, and most preferably a 50% or greater change in expression levels.

[0067] By “ameliorate” is meant decrease, suppress, attenuate, diminish, arrest, or stabilize the development or progression of a disease.

[0068] The term “antibody” (Ab) as used herein includes monoclonal antibodies, polyclonal antibodies, multispecific antibodies (e.g., bispecific antibodies), and antibody fragments, so long as they exhibit the desired biological activity. The term “immunoglobulin” (Ig) is used interchangeably with “antibody” herein.

[0069] An “isolated antibody” is one that has been separated and/or recovered from a component of its natural environment. Contaminant components of its natural environment are materials that would interfere with diagnostic or therapeutic uses for the antibody, and may include enzymes, hormones, and other proteinaceous or nonproteinaceous solutes. In preferred embodiments, the antibody is purified: (1) to greater than 95% by weight of antibody as determined by the Lowry method, and most preferably more than 99% by weight; (2) to a degree sufficient to obtain at least 15 residues of N-terminal or internal amino acid sequence by use of a spinning cup sequenator; or (3) to homogeneity by SDS-PAGE under reducing or non-reducing conditions using Coomassie blue or, preferably, silver stain. Isolated antibody includes the antibody in situ within recombinant cells since at least one component of the antibody's natural environment will not be present. Ordinarily, however, isolated antibody will be prepared by at least one purification step.

[0070] The basic four-chain antibody unit is a heterotetrameric glycoprotein composed of two identical light (L) chains and two identical heavy (H) chains. An IgM antibody consists of 5 of the basic heterotetramer unit along with an additional polypeptide called J chain, and therefore contain 10 antigen binding sites, while secreted IgA antibodies can polymerize to form polyvalent assemblages comprising 2-5 of the basic 4-chain units along with J chain. In the case of IgGs, the 4-chain unit is generally about 150,000 daltons. Each L chain is linked to an H chain by one covalent disulfide bond, while the two H chains are linked to each other by one or more disulfide bonds depending on the H chain isotype. Each H and L chain also has regularly spaced intrachain disulfide bridges. Each H chain has at the N-terminus, a variable domain (V_{H}) followed by three constant domains (C_{H}) for each of the α and γ chains and four C_{H} domains for μ and ε isotypes. Each L chain has at the N-terminus, a variable domain (V_{L}) followed by a constant domain (C_{L}) at its other end. The V_{L} is aligned with the V_{H} and the C_{L} is aligned with the first constant domain of the heavy chain (C_{H}1). Particular amino acid residues are believed to form an interface between the light chain and heavy chain variable domains. The pairing of a V_{H} and V_{L} together forms a single antigen-binding site. For the structure and properties of the different classes of antibodies, see, e.g., Basic and Clinical Immunology, 8th edition, Daniel P. Stites, Abba I. Terr and Tristram G. Parslow (eds.), Appleton & Lange, Norwalk, Conn., 1994, page 71, and Chapter 6.

[0071] The L chain from any vertebrate species can be assigned to one of two clearly distinct types, called kappa (κ) and lambda (λ), based on the amino acid sequences of their constant domains (C_{L}). Depending on the amino acid sequence of the constant domain of their heavy chains (C_{H}), immunoglobulins can be assigned to different classes or isotypes. There are five classes of immunoglobulins: IgA, IgD, IgE, IgG, and IgM, having heavy chains designated alpha (α), delta (δ), epsilon (ε), gamma (γ) and mu (μ), respectively. The γ and α classes are further divided into subclasses on the basis of relatively minor differences in C_{H} sequence and function, e.g., humans express the following subclasses: IgG1, IgG2, IgG3, IgG4, IgA1, and IgA2. The term “variable” refers to the fact that certain segments of the V domains differ extensively in sequence among antibodies. The V domain mediates antigen binding and defines specificity of a particular antibody for its particular antigen. However, the variability is not evenly distributed across the 110-amino acid span of the variable domains. Instead, the V regions consist of relatively invariant stretches called framework regions (FRs) of 15-30 amino acids separated by shorter regions of extreme variability called “hypervariable regions” that are each 9-12 amino acids long. The variable domains of native heavy and light chains each comprise four FRs, largely adopting a β-sheet configuration, connected by three hypervariable regions, which form loops connecting, and in some cases forming part of, the β-sheet structure. The hypervariable regions in each chain are held together in close proximity by the FRs and, with the hypervariable regions from the other chain, contribute to the formation of the antigen-binding site of antibodies (see Kabat et al., Sequences of Proteins of Immunological Interest, 5th Ed. Public Health Service, National Institutes of Health, Bethesda, Md. (1991)). The constant domains are not involved directly in binding an antibody to an antigen, but exhibit various effector functions, such as participation of the antibody in antibody dependent cellular cytotoxicity (ADCC).

[0072] The term “hypervariable region” when used herein refers to the amino acid residues of an antibody that are responsible for antigen binding. The hypervariable region generally comprises amino acid residues from a “complementarity determining region” or “CDR” (e.g., around about residues 24-34 (L1), 50-56 (L2) and 89-97 (L3) in the V_{L}, and around about 31-35 (H1), 50-65 (H2) and 95-102 (H3) in the V_{H} when numbered in accordance with the Kabat numbering system; Kabat et al., Sequences of Proteins of Immunological Interest, 5th Ed. Public Health Service, National Institutes of Health, Bethesda, Md. (1991)); and/or those residues from a “hypervariable loop” (e.g., residues 24-34 (L1), 50-56 (L2) and 89-97 (L3) in the V_{L}, and 26-32 (H1), 52-56 (H2) and 95-101 (H3) in the V_{H} when numbered in accordance with the Chothia numbering system; Chothia and Lesk, J. Mol. Biol. 196:901-917 (1987)); and/or those residues from a “hypervariable loop”/CDR (e.g., residues 27-38 (L1), 56-65 (L2) and 105-120 (L3) in the V_{L}, and 27-38 (H1), 56-65 (H2) and 105-120 (H3) in the V_{H} when numbered in accordance with the IMGT numbering system; Lefranc, M. P. et al. Nucl. Acids Res. 27:209-212 (1999), Ruiz, M. e al. Nucl. Acids Res. 28:219-221 (2000)). Optionally the antibody has symmetrical insertions at one or more of the following points 28, 36 (L1), 63, 74-75 (L2) and 123 (L3) in the V_{L}, and 28, 36 (H1), 63, 74-75 (H2) and 123 (H3) in the V_{H} when numbered in accordance with AHo; Honneger, A. and Plunkthun, A. J. Mol. Biol. 309:657-670 (2001)).

[0073] By “germline nucleic acid residue” is meant the nucleic acid residue that naturally occurs in a germline gene encoding a constant or variable region. “Germline gene” is the DNA found in a germ cell (i.e., a cell destined to become an egg or in the sperm). A “germline mutation” refers to a heritable change in a particular DNA that has occurred in a germ cell or the zygote at the single-cell stage, and when transmitted to offspring, such a mutation is incorporated in every cell of the body. A germline mutation is in contrast to a somatic mutation which is acquired in a single body cell. In some cases, nucleotides in a germline DNA sequence encoding for a variable region are mutated (i.e., a somatic mutation) and replaced with a different nucleotide.

[0074] The term “monoclonal antibody” as used herein refers to an antibody obtained from a population of substantially homogeneous antibodies, i.e., the individual antibodies comprising the population are identical except for possible naturally occurring mutations that may be present in minor amounts. Monoclonal antibodies are highly specific, being directed against a single antigenic site. Furthermore, in contrast to polyclonal antibody preparations that include different antibodies directed against different determinants (epitopes), each monoclonal antibody is directed against a single determinant on the antigen. In addition to their specificity, the monoclonal antibodies are advantageous in that they may be synthesized uncontaminated by other antibodies. The modifier “monoclonal” is not to be construed as requiring production of the antibody by any particular method. For example, the monoclonal antibodies useful in the present invention may be prepared by the hybridoma methodology first described by Kohler et al., Nature, 256:495 (1975), or may be made using recombinant DNA methods in bacterial, eukaryotic animal or plant cells (see, e.g., U.S. Pat. No. 4,816,567). The “monoclonal antibodies” may also be isolated from phage antibody libraries using the techniques described in Clackson et al., Nature, 352:624-628 (1991) and Marks et al., J. Mol. Biol., 222:581-597 (1991), for example.

[0075] Monoclonal antibodies include “chimeric” antibodies in which a portion of the heavy and/or light chain is identical with or homologous to corresponding sequences in antibodies derived from a particular species or belonging to a particular antibody class or subclass, while the remainder of the chain(s) is identical with or homologous to corresponding sequences in antibodies derived from another species or belonging to another antibody class or subclass, as well as fragments of such antibodies, so long as they exhibit the desired biological activity (see U.S. Pat. No. 4,816,567; and Morrison et al., Proc. Natl. Acad. Sci. USA, 81:6851-6855 (1984)). Also provided are variable domain antigen-binding sequences derived from human antibodies. Accordingly, chimeric antibodies of primary interest herein include antibodies having one or more human antigen binding sequences (e.g., CDRs) and containing one or more sequences derived from a non-human antibody, e.g., an FR or C region sequence. In addition, chimeric antibodies of primary interest herein include those comprising a human variable domain antigen binding sequence of one antibody class or subclass and another sequence, e.g., FR or C region sequence, derived from another antibody class or subclass. Chimeric antibodies of interest herein also include those containing variable domain antigen-binding sequences related to those described herein or derived from a different species, such as a non-human primate (e.g., Old World Monkey, Ape, etc). Chimeric antibodies also include primatized and humanized antibodies.

[0076] Furthermore, chimeric antibodies may comprise residues that are not found in the recipient antibody or in the donor antibody. These modifications are made to further refine antibody performance. For further details, see Jones et al., Nature 321:522-525 (1986); Riechmann et al., Nature 332:323-329 (1988); and Presta, Curr. Op. Struct. Biol. 2:593-596 (1992).

[0077] A “humanized antibody” is generally considered to be a human antibody that has one or more amino acid residues introduced into it from a source that is non-human. These non-human amino acid residues are often referred to as “import” residues, which are typically taken from an “import” variable domain. Humanization is traditionally performed following the method of Winter and co-workers (Jones et al., Nature, 321:522-525 (1986); Reichmann et al., Nature, 332:323-327 (1988); Verhoeyen et al., Science, 239:1534-1536 (1988)), by substituting import hypervariable region sequences for the corresponding sequences of a human antibody. Accordingly, such “humanized” antibodies are chimeric antibodies (U.S. Pat. No. 4,816,567) wherein substantially less than an intact human variable domain has been substituted by the corresponding sequence from a non-human species.

[0078] A “human antibody” is an antibody containing only sequences present in an antibody naturally produced by a human. However, as used herein, human antibodies may comprise residues or modifications not found in a naturally occurring human antibody, including those modifications and variant sequences described herein. These are typically made to further refine or enhance antibody performance.

[0079] An “intact” antibody is one that comprises an antigen-binding site as well as a C_{L} and at least heavy chain constant domains, C_{H} 1, C_{H} 2 and C_{H} 3. The constant domains may be native sequence constant domains (e.g., human native sequence constant domains) or amino acid sequence variant thereof. Preferably, the intact antibody has one or more effector functions. An “antibody fragment” comprises a portion of an intact antibody, preferably the antigen binding or variable region of the intact antibody. Examples of antibody fragments include Fab, Fab′, F(ab′)₂, and Fv fragments; diabodies; linear antibodies (see U.S. Pat. No. 5,641,870; Zapata et al., Protein Eng. 8(10): 1057-1062 [1995]); single-chain antibody molecules; and multispecific antibodies formed from antibody fragments.

[0080] The phrase “functional fragment or analog” of an antibody is a compound having qualitative biological activity in common with a full-length antibody. For example, a functional fragment or analog of an anti-IgE antibody is one that can bind to an IgE immunoglobulin in such a manner so as to prevent or substantially reduce the ability of such molecule from having the ability to bind to the high affinity receptor, Fc_{ε}RI.

[0081] Papain digestion of antibodies produces two identical antigen-binding fragments, called “Fab” fragments, and a residual “Fc” fragment, a designation reflecting the ability to crystallize readily. The Fab fragment consists of an entire L chain along with the variable region domain of the H chain (V_{H}), and the first constant domain of one heavy chain (C_{H} 1). Each Fab fragment is monovalent with respect to antigen binding, i.e., it has a single antigen-binding site. Pepsin treatment of an antibody yields a single large F(ab′)₂ fragment that roughly corresponds to two disulfide linked Fab fragments having divalent antigen-binding activity and is still capable of cross-linking antigen. Fab′ fragments differ from Fab fragments by having additional few residues at the carboxy terminus of the C_{H}1 domain including one or more cysteines from the antibody hinge region. Fab′-SH is the designation herein for Fab′ in which the cysteine residue(s) of the constant domains bear a free thiol group. F(ab′)₂ antibody fragments originally were produced as pairs of Fab′ fragments that have hinge cysteines between them. Other chemical couplings of antibody fragments are also known.

[0082] The “Fc” fragment comprises the carboxy-terminal portions of both H chains held together by disulfides. The effector functions of antibodies are determined by sequences in the Fc region, which region is also the part recognized by Fc receptors (FcR) found on certain types of cells.

[0083] “Fv” is the minimum antibody fragment that contains a complete antigen-recognition and -binding site. This fragment consists of a dimer of one heavy- and one light-chain variable region domain in tight, non-covalent association. From the folding of these two domains emanate six hypervariable loops (three loops each from the H and L chain) that contribute the amino acid residues for antigen binding and confer antigen binding specificity to the antibody. However, even a single variable domain (or half of an Fv comprising only three CDRs specific for an antigen) has the ability to recognize and bind antigen, although at a lower affinity than the entire binding site.

[0084] “Single-chain Fv” also abbreviated as “sFv” or “scFv” are antibody fragments that comprise the V_{H} and V_{L} antibody domains connected into a single polypeptide chain. Preferably, the sFv polypeptide further comprises a polypeptide linker between the V_{H} and V_{L} domains that enables the sFv to form the desired structure for antigen binding. For a review of sFv, see Pluckthun in The Pharmacology of Monoclonal Antibodies, vol. 113, Rosenburg and Moore eds., Springer-Verlag, New York, pp. 269-315 (1994); Borrebaeck 1995, infra.

[0085] The term “diabodies” refers to small antibody fragments prepared by constructing sFv fragments (see preceding paragraph) with short linkers (about 5-10 residues) between the V_{H} and V_{L} domains such that inter-chain but not intra-chain pairing of the V domains is achieved, resulting in a bivalent fragment, i.e., fragment having two antigen-binding sites. Bispecific diabodies are heterodimers of two “crossover” sFv fragments in which the V_{H} and V_{L} domains of the two antibodies are present on different polypeptide chains. Diabodies are described more fully in, for example, EP 404,097; WO 93/11161; and Hollinger et al., Proc. Natl. Acad. Sci. USA, 90:6444-6448 (1993).

[0086] As used herein, an antibody that “internalizes” is one that is taken up by (i.e., enters) the cell upon binding to an antigen on a mammalian cell (e.g., a cell surface polypeptide or receptor). The internalizing antibody will of course include antibody fragments, human or chimeric antibody, and antibody conjugates. For certain therapeutic applications, internalization in vivo is contemplated. The number of antibody molecules internalized will be sufficient or adequate to kill a cell or inhibit its growth, especially an infected cell. Depending on the potency of the antibody or antibody conjugate, in some instances, the uptake of a single antibody molecule into the cell is sufficient to kill the target cell to which the antibody binds. For example, certain toxins are highly potent in killing such that internalization of one molecule of the toxin conjugated to the antibody is sufficient to kill the infected cell.

[0087] As used herein, an antibody is said to be “immunospecific,” “specific for” or to “specifically bind” an antigen if it reacts at a detectable level with the antigen, preferably with an affinity constant, Kₐ, of greater than or equal to about 10⁴ M⁻¹, or greater than or equal to about 10⁵ M⁻¹, greater than or equal to about 10⁶ M⁻¹, greater than or equal to about 10⁷ M⁻¹, or greater than or equal to 10⁸ M⁻¹. Affinity of an antibody for its cognate antigen is also commonly expressed as a dissociation constant K_{D}, and in certain embodiments, HuM2e antibody specifically binds to M2e if it binds with a K_{D} of less than or equal to 10⁻⁴ M, less than or equal to about 10⁻⁵ M, less than or equal to about 10⁻⁶ M, less than or equal to 10⁻⁷ M, or less than or equal to 10⁻⁸ M. Affinities of antibodies can be readily determined using conventional techniques, for example, those described by Scatchard et al. (Ann. N.Y. Acad. Sci. USA 51:660 (1949)).

[0088] Binding properties of an antibody to antigens, cells or tissues thereof may generally be determined and assessed using immunodetection methods including, for example, immunofluorescence-based assays, such as immuno-histochemistry (IHC) and/or fluorescence-activated cell sorting (FACS).

[0089] An antibody having a “biological characteristic” of a designated antibody is one that possesses one or more of the biological characteristics of that antibody which distinguish it from other antibodies. For example, in certain embodiments, an antibody with a biological characteristic of a designated antibody will bind the same epitope as that bound by the designated antibody and/or have a common effector function as the designated antibody. The term “antagonist” antibody is used in the broadest sense, and includes an antibody that partially or fully blocks, inhibits, or neutralizes a biological activity of an epitope, polypeptide, or cell that it specifically binds. Methods for identifying antagonist antibodies may comprise contacting a polypeptide or cell specifically bound by a candidate antagonist antibody with the candidate antagonist antibody and measuring a detectable change in one or more biological activities normally associated with the polypeptide or cell.

[0090] Antibody “effector functions” refer to those biological activities attributable to the Fc region (a native sequence Fc region or amino acid sequence variant Fc region) of an antibody, and vary with the antibody isotype. Examples of antibody effector functions include: C1q binding and complement dependent cytotoxicity; Fc receptor binding; antibody-dependent cell-mediated cytotoxicity (ADCC); phagocytosis; down regulation of cell surface receptors (e.g., B cell receptor); and B cell activation.

[0091] By “binding to” a molecule is meant having a physicochemical affinity for that molecule.

[0092] By “control” or “reference” is meant a standard of comparison. In one aspect, as used herein, “changed as compared to a control” sample or subject is understood as having a level that is statistically different than a sample from a normal, untreated, or control sample. Control samples include, for example, cells in culture, one or more laboratory test animals, or one or more human subjects. Methods to select and test control samples are within the ability of those in the art. An analyte can be a naturally occurring substance that is characteristically expressed or produced by the cell or organism (e.g., an antibody, a protein) or a substance produced by a reporter construct (e.g, β-galactosidase or luciferase). Depending on the method used for detection, the amount and measurement of the change can vary. Determination of statistical significance is within the ability of those skilled in the art, e.g., the number of standard deviations from the mean that constitute a positive result.

[0093] “Detect” refers to identifying the presence, absence, or amount of the agent (e.g., a nucleic acid molecule, for example deoxyribonucleic acid (DNA) or ribonucleic acid (RNA)) to be detected.

[0094] By “detectable label” is meant a composition that when linked (e.g., joined—directly or indirectly) to a molecule of interest renders the latter detectable, via, for example, spectroscopic, photochemical, biochemical, immunochemical, or chemical means. Direct labeling can occur through bonds or interactions that link the label to the molecule, and indirect labeling can occur through the use of a linker or bridging moiety which is either directly or indirectly labeled. Bridging moieties may amplify a detectable signal. For example, useful labels may include radioactive isotopes, magnetic beads, metallic beads, colloidal particles, fluorescent labeling compounds, electron-dense reagents, enzymes (for example, as commonly used in an enzyme-linked immunosorbent assay (ELISA)), biotin, digoxigenin, or haptens. When the fluorescently labeled molecule is exposed to light of the proper wave length, its presence can then be detected due to fluorescence. Among the most commonly used fluorescent labeling compounds are fluorescein isothiocyanate, rhodamine, phycoerythrin, phycocyanin, allophycocyanin, p-phthaldehyde and fluorescamine. The molecule can also be detectably labeled using fluorescence emitting metals such as 152 Eu, or others of the lanthanide series. These metals can be attached to the molecule using such metal chelating groups as diethylenetriaminepentacetic acid (DTPA) or ethylenediaminetetraacetic acid (EDTA). The molecule also can be detectably labeled by coupling it to a chemiluminescent compound. The presence of the chemiluminescent-tagged molecule is then determined by detecting the presence of luminescence that arises during the course of chemical reaction. Examples of particularly useful chemiluminescent labeling compounds are luminol, isoluminol, theromatic acridinium ester, imidazole, acridinium salt and oxalate ester.

[0095] A “detection step” may use any of a variety of known methods to detect the presence of nucleic acid (e.g., methylated DNA) or polypeptide. The types of detection methods in which probes can be used include Western blots, Southern blots, dot or slot blots, and Northern blots.

[0096] As used herein, the term “diagnosing” refers to classifying pathology or a symptom, determining a severity of the pathology (e.g., grade or stage), monitoring pathology progression, forecasting an outcome of pathology, and/or determining prospects of recovery.

[0097] By the terms “effective amount” and “therapeutically effective amount” of a formulation or formulation component is meant a sufficient amount of the formulation or component, alone or in a combination, to provide the desired effect. For example, by “an effective amount” is meant an amount of a compound, alone or in a combination, required to ameliorate the symptoms of a disease, e.g., melanoma, relative to an untreated patient. The effective amount of active compound(s) used to practice the present invention for therapeutic treatment of a disease varies depending upon the manner of administration, the age, body weight, and general health of the subject. Ultimately, the attending physician or veterinarian will decide the appropriate amount and dosage regimen. Such amount is referred to as an “effective” amount.

[0098] The term “expression profile” is used broadly to include a genomic expression profile. Profiles may be generated by any convenient means for determining a level of a nucleic acid sequence, e.g., quantitative hybridization of microRNA, labeled microRNA, amplified microRNA, complementary/synthetic DNA (cDNA), etc., quantitative polymerase chain reaction (PCR), and ELISA for quantitation, and allow the analysis of differential gene expression between two samples. A subject or patient tumor sample is assayed. Samples are collected by any convenient method, as known in the art. According to some embodiments, the term “expression profile” means measuring the relative abundance of the nucleic acid sequences in the measured samples.

[0099] By “FDR” is meant False Discovery Rate. When performing multiple statistical tests, for example, in comparing the signal of two groups in multiple data features, there is an increasingly high probability of obtaining false positive results, by random differences between the groups that can reach levels that would otherwise be considered statistically significant. In some cases, in order to limit the proportion of such false discoveries, statistical significance is defined only for data features in which the differences reached a p-value (by two-sided t-test) below a threshold, which is dependent on the number of tests performed and the distribution of p-values obtained in these tests.

[0100] By “fragment” is meant a portion of a polypeptide or nucleic acid molecule. This portion contains, preferably, at least 10%, 20%, 30%, 40%, 50%, 60%, 70%, 80%, or 90% of the entire length of the reference nucleic acid molecule or polypeptide. For example, a fragment may contain 10, 20, 30, 40, 50, 60, 70, 80, 90, or 100, 200, 300, 400, 500, 600, 700, 800, 900, or 1000 nucleotides or amino acids. However, the invention also comprises polypeptides and nucleic acid fragments, so long as they exhibit the desired biological activity of the full length polypeptides and nucleic acid, respectively. A nucleic acid fragment of almost any length is employed. For example, illustrative polynucleotide segments with total lengths of about 10,000, about 5000, about 3000, about 2,000, about 1,000, about 500, about 200, about 100, about 50 base pairs in length (including all intermediate lengths) are included in many implementations of this invention. Similarly, a polypeptide fragment of almost any length is employed. For example, illustrative polypeptide segments with total lengths of about 10,000, about 5,000, about 3,000, about 2,000, about 1,000, about 5,000, about 1,000, about 500, about 200, about 100, or about 50 amino acids in length (including all intermediate lengths) are included in many implementations of this invention.

[0101] “Hybridization” means hydrogen bonding, which may be Watson-Crick, Hoogsteen or reversed Hoogsteen hydrogen bonding, between complementary nucleobases. For example, adenine and thymine are complementary nucleobases that pair through the formation of hydrogen bonds.

[0102] By “hybridize” is meant pair to form a double-stranded molecule between complementary polynucleotide sequences (e.g., a gene described herein), or portions thereof, under various conditions of stringency. (See, e.g., Wahl, G. M. and S. L. Berger (1987) Methods Enzymol. 152:399; Kimmel, A. R. (1987) Methods Enzymol. 152:507).

[0103] The terms “isolated,” “purified,” or “biologically pure” refer to material that is free to varying degrees from components which normally accompany it as found in its native state. “Isolate” denotes a degree of separation from original source or surroundings. “Purify” denotes a degree of separation that is higher than isolation.

[0104] A “purified” or “biologically pure” protein is sufficiently free of other materials such that any impurities do not materially affect the biological properties of the protein or cause other adverse consequences. That is, a nucleic acid or peptide of this invention is purified if it is substantially free of cellular material, viral material, or culture medium when produced by recombinant DNA techniques, or chemical precursors or other chemicals when chemically synthesized. Purity and homogeneity are typically determined using analytical chemistry techniques, for example, polyacrylamide gel electrophoresis or high performance liquid chromatography. The term “purified” can denote that a nucleic acid or protein gives rise to essentially one band in an electrophoretic gel. For a protein that can be subjected to modifications, for example, phosphorylation or glycosylation, different modifications may give rise to different isolated proteins, which can be separately purified.

[0105] Similarly, by “substantially pure” is meant a nucleotide or polypeptide that has been separated from the components that naturally accompany it. Typically, the nucleotides and polypeptides are substantially pure when they are at least 60%, 70%, 80%, 90%, 95%, or even 99%, by weight, free from the proteins and naturally-occurring organic molecules with they are naturally associated.

[0106] By “isolated nucleic acid” is meant a nucleic acid that is free of the genes which flank it in the naturally-occurring genome of the organism from which the nucleic acid is derived. The term covers, for example: (a) a DNA which is part of a naturally occurring genomic DNA molecule, but is not flanked by both of the nucleic acid sequences that flank that part of the molecule in the genome of the organism in which it naturally occurs; (b) a nucleic acid incorporated into a vector or into the genomic DNA of a prokaryote or eukaryote in a manner, such that the resulting molecule is not identical to any naturally occurring vector or genomic DNA; (c) a separate molecule such as a synthetic cDNA, a genomic fragment, a fragment produced by polymerase chain reaction (PCR), or a restriction fragment; and (d) a recombinant nucleotide sequence that is part of a hybrid gene, i.e., a gene encoding a fusion protein. Isolated nucleic acid molecules according to the present invention further include molecules produced synthetically, as well as any nucleic acids that have been altered chemically and/or that have modified backbones. For example, the isolated nucleic acid is a purified cDNA or RNA polynucleotide. Isolated nucleic acid molecules also include messenger ribonucleic acid (mRNA) molecules.

[0107] By an “isolated polypeptide” is meant a polypeptide of the invention that has been separated from components that naturally accompany it. Typically, the polypeptide is isolated when it is at least 60%, by weight, free from the proteins and naturally-occurring organic molecules with which it is naturally associated. Preferably, the preparation is at least 75%, more preferably at least 90%, and most preferably at least 99%, by weight, a polypeptide of the invention. An isolated polypeptide of the invention may be obtained, for example, by extraction from a natural source, by expression of a recombinant nucleic acid encoding such a polypeptide; or by chemically synthesizing the protein. Purity can be measured by any appropriate method, for example, column chromatography, polyacrylamide gel electrophoresis, or by HPLC analysis.

[0108] The term “immobilized” or “attached” refers to a probe (e.g., nucleic acid or protein) and a solid support in which the binding between the probe and the solid support is sufficient to be stable under conditions of binding, washing, analysis, and removal. The binding may be covalent or non-covalent. Covalent bonds may be formed directly between the probe and the solid support or may be formed by a cross linker or by inclusion of a specific reactive group on either the solid support or the probe or both molecules. Non-covalent binding may be one or more of electrostatic, hydrophilic, and hydrophobic interactions. Included in non-covalent binding is the covalent attachment of a molecule to the support and the non-covalent binding of a biotinylated probe to the molecule. Immobilization may also involve a combination of covalent and non-covalent interactions.

[0109] By “marker” is meant any protein or polynucleotide having an alteration in expression level or activity that is associated with a disease or disorder, e.g., melanoma.

[0110] By “melanoma-associated gene” is meant a nucleic acid associated with the pathogenesis of melanoma.

[0111] By “modulate” is meant alter (increase or decrease). Such alterations are detected by standard art-known methods such as those described herein.

[0112] The term, “normal amount” refers to a normal amount of a complex in an individual known not to be diagnosed with melanoma. The amount of the molecule can be measured in a test sample and compared to the “normal control level,” utilizing techniques such as reference limits, discrimination limits, or risk defining thresholds to define cutoff points and abnormal values (e.g., for melanoma). The “normal control level” means the level of one or more proteins (or nucleic acids) or combined protein indices (or combined nucleic acid indices) typically found in a subject known not to be suffering from melanoma. Such normal control levels and cutoff points may vary based on whether a molecule is used alone or in a formula combining other proteins into an index. Alternatively, the normal control level can be a database of protein patterns from previously tested subjects who did not convert to melanoma over a clinically relevant time horizon. In another aspect, the normal control level can be a level relative to a housekeeping gene.

[0113] The level that is determined may be the same as a control level or a cut off level or a threshold level, or may be increased or decreased relative to a control level or a cut off level or a threshold level. In some aspects, the control subject is a matched control of the same species, gender, ethnicity, age group, smoking status, body mass index (BMI), current therapeutic regimen status, medical history, or a combination thereof, but differs from the subject being diagnosed in that the control does not suffer from the disease in question or is not at risk for the disease.

[0114] Relative to a control level, the level that is determined may be an increased level. As used herein, the term “increased” with respect to level (e.g., expression level, biological activity level, etc.) refers to any % increase above a control level. The increased level may be at least or about a 1% increase, at least or about a 5% increase, at least or about a 10% increase, at least or about a 15% increase, at least or about a 20% increase, at least or about a 25% increase, at least or about a 30% increase, at least or about a 35% increase, at least or about a 40% increase, at least or about a 45% increase, at least or about a 50% increase, at least or about a 55% increase, at least or about a 60% increase, at least or about a 65% increase, at least or about a 70% increase, at least or about a 75% increase, at least or about a 80% increase, at least or about a 85% increase, at least or about a 90% increase, or at least or about a 95% increase, relative to a control level.

[0115] Relative to a control level, the level that is determined may be a decreased level. As used herein, the term “decreased” with respect to level (e.g., expression level, biological activity level, etc.) refers to any % decrease below a control level. The decreased level may be at least or about a 1% decrease, at least or about a 5% decrease, at least or about a 10% decrease, at least or about a 15% decrease, at least or about a 20% decrease, at least or about a 25% decrease, at least or about a 30% decrease, at least or about a 35% decrease, at least or about a 40% decrease, at least or about a 45% decrease, at least or about a 50% decrease, at least or about a 55% decrease, at least or about a 60% decrease, at least or about a 65% decrease, at least or about a 70% decrease, at least or about a 75% decrease, at least or about a 80% decrease, at least or about a 85% decrease, at least or about a 90% decrease, or at least or about a 95% decrease, relative to a control level.

[0116] Nucleic acid molecules useful in the methods of the invention include any nucleic acid molecule that encodes a polypeptide of the invention or a fragment thereof. Such nucleic acid molecules need not be 100% identical with an endogenous nucleic acid sequence, but will typically exhibit substantial identity, e.g., at least 80%, at least 85%, at least 90%, at least 95%, or at least 99% identity. Polynucleotides having “substantial identity” to an endogenous sequence are typically capable of hybridizing with at least one strand of a double-stranded nucleic acid molecule.

[0117] For example, stringent salt concentration will ordinarily be less than about 750 mM NaCl and 75 mM trisodium citrate, preferably less than about 500 mM NaCl and 50 mM trisodium citrate, and more preferably less than about 250 mM NaCl and 25 mM trisodium citrate. Low stringency hybridization can be obtained in the absence of organic solvent, e.g., formamide, while high stringency hybridization can be obtained in the presence of at least about 35% formamide, and more preferably at least about 50% formamide. Stringent temperature conditions will ordinarily include temperatures of at least about 30° C., more preferably of at least about 37° C., and most preferably of at least about 42° C. Varying additional parameters, such as hybridization time, the concentration of detergent, e.g., sodium dodecyl sulfate (SDS), and the inclusion or exclusion of carrier DNA, are well known to those skilled in the art. Various levels of stringency are accomplished by combining these various conditions as needed. In a preferred embodiment, hybridization will occur at 30° C. in 750 mM NaCl, 75 mM trisodium citrate, and 1% SDS. In a more preferred embodiment, hybridization will occur at 37° C. in 500 mM NaCl, 50 mM trisodium citrate, 1% SDS, 35% formamide, and 100 μg/ml denatured salmon sperm DNA (ssDNA). In a most preferred embodiment, hybridization will occur at 42° C. in 250 mM NaCl, 25 mM trisodium citrate, 1% SDS, 50% formamide, and 200 μg/ml ssDNA. Useful variations on these conditions will be readily apparent to those skilled in the art.

[0118] For most applications, washing steps that follow hybridization will also vary in stringency. Wash stringency conditions can be defined by salt concentration and by temperature. As above, wash stringency can be increased by decreasing salt concentration or by increasing temperature. For example, stringent salt concentration for the wash steps will preferably be less than about 30 mM NaCl and 3 mM trisodium citrate, and most preferably less than about 15 mM NaCl and 1.5 mM trisodium citrate. Stringent temperature conditions for the wash steps will ordinarily include a temperature of at least about 25° C., more preferably of at least about 42° C., and even more preferably of at least about 68° C. In a preferred embodiment, wash steps will occur at 25° C. in 30 mM NaCl, 3 mM trisodium citrate, and 0.1% SDS. In a more preferred embodiment, wash steps will occur at 42 C in 15 mM NaCl, 1.5 mM trisodium citrate, and 0.1% SDS. In a more preferred embodiment, wash steps will occur at 68° C. in 15 mM NaCl, 1.5 mM trisodium citrate, and 0.1% SDS. Additional variations on these conditions will be readily apparent to those skilled in the art. Hybridization techniques are well known to those skilled in the art and are described, for example, in Benton and Davis (Science 196:180, 1977); Grunstein and Hogness (Proc. Natl. Acad. Sci., USA 72:3961, 1975); Ausubel et al. (Current Protocols in Molecular Biology, Wiley Interscience, New York, 2001); Berger and Kimmel (Guide to Molecular Cloning Techniques, 1987, Academic Press, New York); and Sambrook et al., Molecular Cloning: A Laboratory Manual, Cold Spring Harbor Laboratory Press, New York.

[0119] By “neoplasia” is meant a disease or disorder characterized by excess proliferation or reduced apoptosis. Illustrative neoplasms for which the invention can be used include, but are not limited to pancreatic cancer, leukemias (e.g., acute leukemia, acute lymphocytic leukemia, acute myelocytic leukemia, acute myeloblastic leukemia, acute promyelocytic leukemia, acute myelomonocytic leukemia, acute monocytic leukemia, acute erythroleukemia, chronic leukemia, chronic myelocytic leukemia, chronic lymphocytic leukemia), polycythemia vera, lymphoma (Hodgkin's disease, non-Hodgkin's disease), Waldenstrom's macroglobulinemia, heavy chain disease, and solid tumors such as sarcomas and carcinomas (e.g., fibrosarcoma, myxosarcoma, liposarcoma, chondrosarcoma, osteogenic sarcoma, chordoma, angiosarcoma, endotheliosarcoma, lymphangiosarcoma, lymphangioendotheliosarcoma, synovioma, mesothelioma, Ewing's tumor, leiomyosarcoma, rhabdomyosarcoma, colon carcinoma, breast cancer, ovarian cancer, prostate cancer, squamous cell carcinoma, basal cell carcinoma, adenocarcinoma, sweat gland carcinoma, sebaceous gland carcinoma, papillary carcinoma, papillary adenocarcinomas, cystadenocarcinoma, medullary carcinoma, bronchogenic carcinoma, renal cell carcinoma, hepatoma, nile duct carcinoma, choriocarcinoma, seminoma, embryonal carcinoma, Wilm's tumor, cervical cancer, uterine cancer, testicular cancer, lung carcinoma, small cell lung carcinoma, bladder carcinoma, epithelial carcinoma, glioma, glioblastoma multiforme, astrocytoma, medulloblastoma, craniopharyngioma, ependymoma, pinealoma, hemangioblastoma, acoustic neuroma, oligodenroglioma, schwannoma, meningioma, melanoma, neuroblastoma, and retinoblastoma).

[0120] As used herein, in one aspect, “next-generation sequencing” (NGS), also known as high-throughput sequencing, is the catch-all term used to describe a number of different sequencing methodologies including, but not limited to, Illumina® sequencing, Roche 454 Sequencing™, Ion Torrent™: Proton/personal genome machine (PGM) sequencing, and SOLiD sequencing. These recent technologies allow for sequencing DNA and RNA much more quickly and cheaply than the previously used Sanger sequencing. See, LeBlanc et al., 2015 Cancers, 7: 1925-1958, incorporated herein by reference; and Goodwin et al., 2016 Nature Reviews Genetics, 17: 333-351, incorporated herein by reference.

[0121] As used herein, “obtaining” as in “obtaining an agent” includes synthesizing, purchasing, or otherwise acquiring the agent.

[0122] Unless specifically stated or obvious from context, as used herein, the term “or” is understood to be inclusive. Unless specifically stated or obvious from context, as used herein, the terms “a”, “an”, and “the” are understood to be singular or plural.

[0123] The phrase “pharmaceutically acceptable carrier” is art recognized and includes a pharmaceutically acceptable material, composition or vehicle, suitable for administering compounds of the present invention to mammals. The carriers include liquid or solid filler, diluent, excipient, solvent or encapsulating material, involved in carrying or transporting the subject agent from one organ, or portion of the body, to another organ, or portion of the body. Each carrier must be “acceptable” in the sense of being compatible with the other ingredients of the formulation and not injurious to the patient. Some examples of materials which can serve as pharmaceutically acceptable carriers include: sugars, such as lactose, glucose and sucrose; starches, such as corn starch and potato starch; cellulose, and its derivatives, such as sodium carboxymethyl cellulose, ethyl cellulose and cellulose acetate; powdered tragacanth; malt; gelatin; talc; excipients, such as cocoa butter and suppository waxes; oils, such as peanut oil, cottonseed oil, safflower oil, sesame oil, olive oil, corn oil and soybean oil; glycols, such as propylene glycol; polyols, such as glycerin, sorbitol, mannitol and polyethylene glycol; esters, such as ethyl oleate and ethyl laurate; agar; buffering agents, such as magnesium hydroxide and aluminum hydroxide; alginic acid; pyrogen-free water; isotonic saline; Ringer's solution; ethyl alcohol; phosphate buffer solutions; and other non-toxic compatible substances employed in pharmaceutical formulations.

[0124] By “protein” or “polypeptide” or “peptide” is meant any chain of more than two natural or unnatural amino acids, regardless of post-translational modification (e.g., glycosylation or phosphorylation), constituting all or part of a naturally-occurring or non-naturally occurring polypeptide or peptide, as is described herein.

[0125] “Primer set” means a set of oligonucleotides that may be used, for example, for PCR. A primer set would consist of at least 2, 4, 6, 8, 10, 12, 14, 16, 18, 20, 30, 40, 50, 60, 80, 100, 200, 250, 300, 400, 500, 600, or more primers.

[0126] The terms “preventing” and “prevention” refer to the administration of an agent or composition to a clinically asymptomatic individual who is at risk of developing, susceptible, or predisposed to a particular adverse condition, disorder, or disease, and thus relates to the prevention of the occurrence of symptoms and/or their underlying cause.

[0127] The term “prognosis,” “staging,” and “determination of aggressiveness” are defined herein as the prediction of the degree of severity of the neoplasia, e.g., melanoma, and of its evolution as well as the prospect of recovery as anticipated from usual course of the disease. Once the aggressiveness (e.g. the Gleason score) has been determined, appropriate methods of treatments are chosen.

[0128] Ranges can be expressed herein as from “about” one particular value, and/or to “about” another particular value. When such a range is expressed, another aspect includes from the one particular value and/or to the other particular value. Similarly, when values are expressed as approximations, by use of the antecedent “about,” it is understood that the particular value forms another aspect. It is further understood that the endpoints of each of the ranges are significant both in relation to the other endpoint, and independently of the other endpoint. It is also understood that there are a number of values disclosed herein, and that each value is also herein disclosed as “about” that particular value in addition to the value itself. It is also understood that throughout the application, data are provided in a number of different formats and that this data represent endpoints and starting points and ranges for any combination of the data points. For example, if a particular data point “10” and a particular data point “15” are disclosed, it is understood that greater than, greater than or equal to, less than, less than or equal to, and equal to 10 and 15 are considered disclosed as well as between 10 and 15. It is also understood that each unit between two particular units are also disclosed. For example, if 10 and 15 are disclosed, then 11, 12, 13, and 14 are also disclosed.

[0129] Ranges provided herein are understood to be shorthand for all of the values within the range. For example, a range of 1 to 50 is understood to include any number, combination of numbers, or sub-range from the group consisting 1, 2, 3, 4, 5, 6, 7, 8, 9, 10, 11, 12, 13, 14, 15, 16, 17, 18, 19, 20, 21, 22, 23, 24, 25, 26, 27, 28, 29, 30, 31, 32, 33, 34, 35, 36, 37, 38, 39, 40, 41, 42, 43, 44, 45, 46, 47, 48, 49, or 50 as well as all intervening decimal values between the aforementioned integers such as, for example, 1.1, 1.2, 1.3, 1.4, 1.5, 1.6, 1.7, 1.8, and 1.9. With respect to sub-ranges, “nested sub-ranges” that extend from either end point of the range are specifically contemplated. For example, a nested sub-range of an exemplary range of 1 to 50 may comprise 1 to 10, 1 to 20, 1 to 30, and 1 to 40 in one direction, or 50 to 40, 50 to 30, 50 to 20, and 50 to 10 in the other direction.

[0130] By “reduces” is meant a negative alteration of at least 10%, 25%, 50%, 75%, or 100%.

[0131] A “reference sequence” is a defined sequence used as a basis for sequence comparison or a gene expression comparison. A reference sequence may be a subset of or the entirety of a specified sequence; for example, a segment of a full-length cDNA or gene sequence, or the complete cDNA or gene sequence. For polypeptides, the length of the reference polypeptide sequence will generally be at least about 16 amino acids, preferably at least about 20 amino acids, more preferably at least about 25 amino acids, and even more preferably about 35 amino acids, about 50 amino acids, or about 100 amino acids. For nucleic acids, the length of the reference nucleic acid sequence will generally be at least about 40 nucleotides, preferably at least about 60 nucleotides, more preferably at least about 75 nucleotides, and even more preferably about 100 nucleotides or about 300 or about 500 nucleotides or any integer thereabout or there between.

[0132] The term “sample” as used herein refers to a biological sample obtained for the purpose of evaluation in vitro. Exemplary tissue samples for the methods described herein include tissue samples from melanoma tumors or the surrounding microenvironment (i.e., the stroma). With regard to the methods disclosed herein, the sample or patient sample preferably may comprise any body fluid or tissue. In some embodiments, the bodily fluid includes, but is not limited to, blood, plasma, serum, lymph, breast milk, saliva, mucous, semen, vaginal secretions, cellular extracts, inflammatory fluids, cerebrospinal fluid, feces, vitreous humor, or urine obtained from the subject. In some aspects, the sample is a composite panel of at least two of a blood sample, a plasma sample, a serum sample, and a urine sample. In exemplary aspects, the sample comprises blood or a fraction thereof (e.g., plasma, serum, fraction obtained via leukopheresis). Preferred samples are whole blood, serum, plasma, or urine. A sample can also be a partially purified fraction of a tissue or bodily fluid.

[0133] A reference sample can be a “normal” sample, from a donor not having the disease or condition fluid, or from a normal tissue in a subject having the disease or condition. A reference sample can also be from an untreated donor or cell culture not treated with an active agent (e.g., no treatment or administration of vehicle only). A reference sample can also be taken at a “zero time point” prior to contacting the cell or subject with the agent or therapeutic intervention to be tested or at the start of a prospective study.

[0134] A “solid support” describes a strip, a polymer, a bead, or a nanoparticle. The strip may be a nucleic acid-probe (or protein) coated porous or non-porous solid support strip comprising linking a nucleic acid probe to a carrier to prepare a conjugate and immobilizing the conjugate on a porous solid support. Well-known supports or carriers include glass, polystyrene, polypropylene, polyethylene, dextran, nylon, amylases, natural and modified celluloses, polyacrylamides, gabbros, and magnetite. The nature of the carrier can be either soluble to some extent or insoluble for the purposes of the present invention. The support material may have virtually any possible structural configuration so long as the coupled molecule is capable of binding to a binding agent (e.g., an antibody or nucleic acid molecule). Thus, the support configuration may be spherical, as in a bead, or cylindrical, as in the inside surface of a test tube, or the external surface of a rod. Alternatively, the surface may be flat such as a sheet, or test strip, etc. For example, the supports include polystyrene beads. Those skilled in the art will know many other suitable carriers for binding antibody or antigen, or will be able to ascertain the same by use of routine experimentation. In other aspects, the solid support comprises a polymer, to which an agent is chemically bound, immobilized, dispersed, or associated. A polymer support may be a network of polymers, and may be prepared in bead form (e.g., by suspension polymerization). The location of active sites introduced into a polymer support depends on the type of polymer support. For example, in a swollen-gel-bead polymer support the active sites are distributed uniformly throughout the beads, whereas in a macroporous-bead polymer support they are predominantly on the internal surfaces of the macropores. The solid support, e.g., a device contains a binding agent alone or together with a binding agent for at least one, two, three or more other molecules.

[0135] By “specifically binds” is meant a compound or antibody that recognizes and binds a polypeptide of the invention, but which does not substantially recognize and bind other molecules in a sample, for example, a biological sample, which naturally includes a polypeptide of the invention.

[0136] A “specific binding agent” describes agents having greater than 10-fold, preferably greater than 100-fold, and most preferably, greater than 1000-fold affinity for the target molecule as compared to another molecule. As the skilled artisan will appreciate the term specific is used to indicate that other biomolecules present in the sample do not significantly bind to the binding agent specific for the target molecule. Preferably, the level of binding to a biomolecule other than the target molecule results in a binding affinity which is at most only 10% or less, only 5% or less only 2% or less or only 1% or less of the affinity to the target molecule, respectively. A preferred specific binding agent will fulfill both the above minimum criteria for affinity as well as for specificity. For example, an antibody has a binding affinity in the low micromolar (10⁻⁶), nanomolar (10⁻⁷-10⁻⁹), with high affinity antibodies in the low nanomolar (10⁻⁹) or pico molar (10⁻¹²) range for its specific target molecule.

[0137] By “substantially identical” is meant a polypeptide or nucleic acid molecule exhibiting at least 50% identity to a reference amino acid sequence (for example, any one of the amino acid sequences described herein) or nucleic acid sequence (for example, any one of the nucleic acid sequences described herein). Preferably, such a sequence is at least 60%, at least 70%, at least 80%, at least 85%, at least 90%, at least 95%, or at least 99% identical at the amino acid level or nucleic acid to the sequence used for comparison.

[0138] Sequence identity is typically measured using sequence analysis software (for example, Sequence Analysis Software Package of the Genetics Computer Group, University of Wisconsin Biotechnology Center, 1710 University Avenue, Madison, Wis. 53705, BLAST, BESTFIT, GAP, or PILEUP/PRETTYBOX programs). Such software matches identical or similar sequences by assigning degrees of homology to various substitutions, deletions, and/or other modifications. Conservative substitutions typically include substitutions within the following groups: glycine, alanine; valine, isoleucine, leucine; aspartic acid, glutamic acid, asparagine, glutamine; serine, threonine; lysine, arginine; and phenylalanine, tyrosine. In an exemplary approach to determining the degree of identity, a BLAST program may be used, with a probability score between e⁻³ and e⁻¹⁰⁰ indicating a closely related sequence.

[0139] The term “subject” as used herein includes all members of the animal kingdom prone to suffering from the indicated disorder. In some aspects, the subject is a mammal, and in some aspects, the subject is a human. The methods are also applicable to companion animals such as dogs and cats as well as livestock such as cows, horses, sheep, goats, pigs, and other domesticated and wild animals.

[0140] A subject “suffering from or suspected of suffering from” a specific disease, condition, or syndrome has a sufficient number of risk factors or presents with a sufficient number or combination of signs or symptoms of the disease, condition, or syndrome such that a competent individual would diagnose or suspect that the subject was suffering from the disease, condition, or syndrome. Methods for identification of subjects suffering from or suspected of suffering from conditions associated with cancer (e.g., melanoma) is within the ability of those in the art. Subjects suffering from, and suspected of suffering from, a specific disease, condition, or syndrome are not necessarily two distinct groups.

[0141] As used herein, “susceptible to” or “prone to” or “predisposed to” or “at risk of developing” a specific disease or condition refers to an individual who based on genetic, environmental, health, and/or other risk factors is more likely to develop a disease or condition than the general population. An increase in likelihood of developing a disease may be an increase of about 10%, 20%, 50%, 100%, 150%, 200%, or more.

[0142] The terms “treating” and “treatment” as used herein refer to the administration of an agent or formulation to a clinically symptomatic individual afflicted with an adverse condition, disorder, or disease, so as to effect a reduction in severity and/or frequency of symptoms, eliminate the symptoms and/or their underlying cause, and/or facilitate improvement or remediation of damage. It will be appreciated that, although not precluded, treating a disorder or condition does not require that the disorder, condition or symptoms associated therewith be completely eliminated.

[0143] As used herein, in one aspect, the “tumor microenvironment” (TME) is the cellular environment in which a tumor exists, including surrounding blood vessels, immune cells, fibroblasts, bone marrow-derived inflammatory cells, lymphocytes, signaling molecules and the extracellular matrix (ECM). The tumor and the surrounding microenvironment are closely related and interact constantly. Tumors can influence the microenvironment by releasing extracellular signals, promoting tumor angiogenesis and inducing peripheral immune tolerance, while the immune cells in the microenvironment can affect the growth and evolution of cancerous cells, such as in immuno-editing.

[0144] In some cases, a composition of the invention is administered orally or systemically. Other modes of administration include rectal, topical, intraocular, buccal, intravaginal, intracisternal, intracerebroventricular, intratracheal, nasal, transdermal, within/on implants, or parenteral routes. The term “parenteral” includes subcutaneous, intrathecal, intravenous, intramuscular, intraperitoneal, or infusion. Intravenous or intramuscular routes are not particularly suitable for long-term therapy and prophylaxis. They could, however, be preferred in emergency situations. Compositions comprising a composition of the invention can be added to a physiological fluid, such as blood. Oral administration can be preferred for prophylactic treatment because of the convenience to the patient as well as the dosing schedule. Parenteral modalities (subcutaneous or intravenous) may be preferable for more acute illness, or for therapy in patients that are unable to tolerate enteral administration due to gastrointestinal intolerance, ileus, or other concomitants of critical illness. Inhaled therapy may be most appropriate for pulmonary vascular diseases (e.g., pulmonary hypertension).

[0145] Pharmaceutical compositions may be assembled into kits or pharmaceutical systems for use in arresting cell cycle in rapidly dividing cells, e.g., cancer cells. Kits or pharmaceutical systems according to this aspect of the invention comprise a carrier means, such as a box, carton, tube, having in close confinement therein one or more container means, such as vials, tubes, ampoules, bottles, syringes, or bags. The kits or pharmaceutical systems of the invention may also comprise associated instructions for using the kit.

[0146] Any compositions or methods provided herein can be combined with one or more of any of the other compositions and methods provided herein.

[0147] Any compositions or methods provided herein can be combined with one or more of any of the other compositions and methods provided herein.

[0148] The transitional term “comprising,” which is synonymous with “including,” “containing,” or “characterized by,” is inclusive or open-ended and does not exclude additional, unrecited elements or method steps. By contrast, the transitional phrase “consisting of” excludes any element, step, or ingredient not specified in the claim. The transitional phrase “consisting essentially of” limits the scope of a claim to the specified materials or steps “and those that do not materially affect the basic and novel characteristic(s)” of the claimed invention.

[0149] Other features and advantages of the invention will be apparent from the following description of the preferred embodiments thereof, and from the claims. Unless otherwise defined, all technical and scientific terms used herein have the same meaning as commonly understood by one of ordinary skill in the art to which this invention belongs. Although methods and materials similar or equivalent to those described herein can be used in the practice or testing of the present invention, suitable methods and materials are described below. All published foreign patents and patent applications cited herein are incorporated herein by reference. Genbank and NCBI submissions indicated by accession number cited herein are incorporated herein by reference. All other published references, documents, manuscripts and scientific literature cited herein are incorporated herein by reference. In the case of conflict, the present specification, including definitions, will control. In addition, the materials, methods, and examples are illustrative only and not intended to be limiting.

### BRIEF DESCRIPTION OF THE DRAWINGS

[0150] FIG. 1A-FIG. 1C is a series of graphs showing transcriptomic signatures of resistance to CTLA4 blockade. FIG. 1A is a volcano plot depicting 975 genes enriched in NB tumors and 428 enriched genes in CB tumors. Relative positions of Xq28-CGAs, miR-211, TRPM1, and immune-related genes are shown. FIG. 1B is a graph showing a 75 Kb region within the Xq28 locus containing the 8 CGAs. Bar plots depicting the individual fold changes for each MAGE-A and CSAG gene within this locus are shown for RNA seq in discovery cohort (FIG. 1B (top)) and independent cohort (FIG. 1B (middle)). FIG. 1B (bottom) shows qPCR validation of expression of Xq28-CGA genes in benefit (n=10) and no-benefit (n=11) samples; fold changes are shown relative to HPRT1 gene. FIG. 1C is a graph showing that genes co-enriched with Xq28-CGA expression in TCGA significantly overlap with genes associated with NB tumors.

[0151] FIG. 2A is a volcano plot depicting genes enriched in ‘no progressive disease’ (No PD) and ‘progressive disease’ (PD) groups at week 13 in the ipilimumab-nivolumab arm of the CheckMate 064 trial (Weber et al., 2016) (validation cohort). FIG. 2B is a series of box plots depicting RNA-seq expression for CRMA MAGEA genes between the No PD and PD groups in validation cohort. FIG. 2C is a bar graph showing IHC staining analysis of MAGE-A protein expression in pre-ipilimumab melanoma biopsies. FIG. 2D is a photomicrograph showing examples of MAGE-A protein expression from a patient in the CB (left) and NB (right) groups. Magnification, ×1000.

[0152] FIG. 3A-FIG. 3B is a series of graphs that show DNA methylation patterns in resistant tumors and Xq28-high TCGA samples. FIG. 3A shows that MAGEA3 and MAGEA6 promoters in ‘no benefit’ patients (n=3) are preferentially de-methylated compared to ‘clinical benefit’ patients (n=3) as validated by bisulfite PCR. The plot highlights the local regression (solid line) of the mean methylation for every CpG (dots) along the MAGEA3 and MAGEA6 promoter in CB versus NB patients. The standard deviation is indicated by the shaded area. Note that both promoter sequences are identical within the analyzed amplicon span. FIG. 3B is a volcano plot of differentially methylated probes with false discovery rate <0.05 across the genome between Xq28 low and Xq28 high expression groups in the TCGA melanoma cohort.

[0153] FIG. 4A-FIG. 4E is a series of graphs showing transcriptomic signatures of clinical benefit to CTLA4 blockade. FIG. 4A is a series of bar plots depicting the individual fold changes for miR-211, TRPM1, and other TRPM family members. FIG. 4B is a bar graph of percentage of differentially expressed genes related to immune response, as determined by self-curation in both NB and CB tumors. FIG. 4C is a graph showing that genes associated with clinical benefit significantly overlap with genes co-enriched with miR-211 expression in TCGA but not with genes inversely associated with miR-211 expression. FIG. 4D is a graph showing that miR-211, miR-185 and miR-513A2 are significantly upregulated in clinical benefit tumors. FIG. 4E is a graph that shows proliferative gene expression signatures are significantly enriched in clinical benefit tumors, while the invasive gene expression signatures are significantly enriched in no benefit tumors.

[0154] FIG. 5A-FIG. 5B are a series of graphs showing that molecular signatures of outcome to CTLA4 blockade are unique and do not predict outcome to PD1 blockade. Specifically, FIG. 5A and FIG. 5B are barplots of fold changes for individual Xq28-CGAs, miR-211 and TRPM1 in pretreatment melanoma samples from responding and nonresponding patients to PD1 blockade. FIG. 5C is a series of box plots of RNA-seq expression values for each MAGEA gene in the CRMA locus within no progressive disease (no PD; blue) (n=23) and progressive disease (PD; orange) (n=14) pre-nivolumab melanoma tumors from CheckMate 064 (Weber et al., 2016).

[0155] FIG. 6A-FIG. 6C is a series of graphs showing that Xq28-CGA antigen and miR-211 predict outcome to CTLA4 blockade. FIG. 6A is a graph showing correlation of Xq28 CT antigen and miR-211 expression for all 40 patients in discovery cohort including NB, CB and “long term survival with no clinical benefit.” FIG. 6B is a graph showing ROC analysis comparing neoantigen load, CTLA4 expression, combined neoantigen load+CTLA4 expression, combined “Xq28-CGA+miR-211” expression, and a combination of all four parameters for all patients. FIG. 6C is a graph showing overall survival Kaplan-Meier curves for combination “neoantigen load+CTLA4 (left),” “Xq28-CGA+miR-211 (middle)” and “Xq28-CGA+miR-211+neoantigen load+CTLA4 (right).” FIG. 6D is Kaplan-Meier overall survival analysis comparing patients from discovery cohort classified by expression of MAGE-A protein. FIG. 6E is a table showing the Cox proportional hazards model of risk factors for outcomes after ipilimumab therapy. FIG. 6F is a graph showing the Kaplan-Meier overall survival analysis of TCGA melanoma samples with high or low expression of Xq28-CGA genes.

[0156] FIG. 7 is a series of graphs showing qPCR validation of Xq28-CGA genes using different housekeeping genes. Barplots showing similar fold changes of Xq28 genes from qPCR using either GAPDH (top) or PGK1 (bottom) as housekeeping genes.

[0157] FIG. 8 a series of graphs showing copy number analysis of Xq28 region in Clinical Benefit/No Benefit patients. Neither the locus average of copy ratios, nor copy ratios on individual targets showed a statistically significant germline or somatic variation between the two groups at 5% level.

[0158] FIG. 9 is a bar graph showing that DTIC/temozolamide treatment history does not affect outcome after ipilimumab. Patients were grouped into “DTIC” cohort if DTIC or temozolamide were used as treatment any timepoint before ipilimumab.

[0159] FIG. 10A-FIG. 10B is a series of graphs showing that gender and purity do not affect outcome after ipilimumab. Barplots of gender and purity comparing CB and NB groups showing no effect.

[0160] FIG. 11A-FIG. 11D is a series of graphs that show that MAGE-A proteins may degrade the danger molecule HMGB1. FIG. 11A is a bar graph showing the results of an in vitro screen for MAGE-TRIM28 ubiquitination substrates identifies HMGB1 (p<0.05). FIG. 11B is a series of photomicrographs with immunofluorescence staining for MAGE-A and HMGB1 showing mutual exclusion in five patient samples from the discovery cohort in addition to a human xenograft melanoma. Magnification ×400. FIG. 11C is a bar graph showing the percentage of differentially expressed genes related to immune response, in both NB (3.5%) and CB (56%) tumors. FIG. 11D is a graph showing gene set enrichment analysis of immune gene sets showing p-value of enrichment (signed according to enrichment score). Dashed line represents p=0.05.

[0161] FIG. 12A-FIG. 12D is a series of graphs showing that Xq28-CGA genes are upregulated in ipilimumab-resistant melanoma samples. FIG. 12A is a heatmap showing relative expression of Xq28-CGA genes for CB and NB patients in the discovery cohort with annotations for gender, purity and RECIST response. FIG. 12B is a heatmap showing relative expression of Xq28-CGA genes in the validation set (CheckMate 064) with annotations for gender and RECIST response. FIG. 12C is a series of box plots depicting the individual fold changes for each MAGEA gene within the Xq28-CGA locus for patients with no progressive (“no PD”) or progressive disease (“PD”) in the discovery cohort; p-values using the Wilcoxon test.

[0162] FIG. 13A is a graph showing that bisulfite PCR of unique methylation sites within the gene bodies of MAGEA3/A6/A12 genes highlights a slight to moderate decrease in methylation in NB patients (n=4, orange) vs. CB patients (n=4, blue). The position of 3 PCR amplicons are highlighted, and the plots highlight the mean methylation for each CpG within the amplicon region. FIG. 13B is a graph showing chromosomal locations of 65,467 hypomethylated (top) and 47 hypermethylated (bottom) probes in “CRMA-high” TCGA melanoma samples.

[0163] FIG. 14 is a graph showing biological processes enriched in NB transcriptomes. Specifically, FIG. 14 is a heatmap showing relative gene expression of NB-enriched biological categories (see Table 2) along with lack of enrichment of NY-ESO-1 and melanoma differentiation antigens. Annotations of gender, purity and RECIST response included.

[0164] FIG. 15A and FIG. 15B are graphs of immunofluorescence staining on a melanoma tissue mnicroarray (TMA) comprising 100 samples (9 benign nevi tumors, 91 primary and metastatic melanomas) using antibodies against MAGE and HMG3B. The fraction of HMGB1 positive cells were comparable in MAGE negative cells from the benign nevi and malignant tumors, but was significantly reduced in cells from MAGE+ malignant samples ((26% and 31% vs 8%, Chi-square test p<2.2×10⁻¹⁶ FIG. 15A). FIG. 15B is a graph showing that in 13 out of 15 melanomas (stained on the TMA) that had any MAGE positive cells, at least 85% of MAGE+ cells lack HMGB1 (FIG. 15B).

[0165] FIG. 16 is a graph showing the significant overexpression of genes, TLR9 and IL12A, in the clinical benefit tumors. These genes are downstream of the HMGB1 pathway and show this pathway is activated.

[0166] FIG. 17A is a graph showing significantly decreased autophagy (indicated by LC3B positive staining) in MAGE-A+ melanomas on a tissue microarray by immunohistochemistry. FIG. 17B is a graph showing significantly impaired autophagy (indicated by absent LC3B staining or double-positive LC3B/p62 staining) in MAGE-A+ melanomas.

### DETAILED DESCRIPTION OF THE INVENTION

[0167] The invention is based, at least in part, upon the identification of a gene expression signature that discriminates clinical outcomes of CTLA4 blockade. CTLA4 blockade can induce durable clinical remissions in a minority of patients with metastatic melanoma. However, prior to the invention described herein, molecular signatures precisely predicting response and resistance were unknown. While increased neoantigen burden and clonality as well as increased expression of immune-related genes correlate with response, prior to the invention described herein, these molecular signatures were not clinically robust. Moreover, mechanistic insight into clinical resistance was lacking, and prior to the invention described herein, the contribution of epigenetic mechanisms was poorly understood.

[0168] Ipilimumab is an FDA-approved antibody targeting the CTLA4 pathway. Ipilimumab was the first agent to show an overall survival benefit in metastatic melanoma. However, only 15-20% of patients benefit from ipilimumab treatment. Prior to the invention described herein, there was no way to predict clinical outcome. Because ipilimumab carries significant autoimmune toxicity, predicting who will and will not benefit is of critical clinical importance. Ipilimumab is falling out of clinical use with the approval of newer, less toxic immunotherapies; however, long term survival data is only available for this agent. Thus, the results presented herein allow for precisely pairing CTLA4 blockade therapy with the appropriate patient.

[0169] Briefly, transcriptomic and clinical data from three independent melanoma cohorts were analyzed to identify correlates of outcome to CTLA4 blockade: (i) Cohort 1 comprised 40 pre-ipilimumab tumor samples (discovery set); (ii) Cohort 2 comprised 6 pre-treatment (ipilimumab or tremelimumab) samples (validation set 1); and (iii) Cohort 3 comprised 473 melanoma samples from The Cancer Genome Atlas (validation set 2). As described herein, genes that were differentially expressed between the clinical benefit (CB) and no clinical benefit (NB) groups were identified using unadjusted Wilcoxon tests (p<0.05), and a two-fold over-expression threshold in either group. The hypergeometric test was used to evaluate overlap of differentially expressed genes between cohorts, and the single-sample gene set enrichment (ssGSEA) method to identify pathway-level differences. Moreover, TCGA melanoma samples with high expression of the Xq28 CGA locus exhibited profound global hypomethylation, implicating epigenomic dysregulation and overexpression of Xq28 CGAs in primary resistance to CTLA4 blockade. Methylation-specific PCR of specific methylation sites of MAGE-A2, MAGE-A3, and MAGE-A12 revealed decreased methylation at these sites in nonresponding (vs. responding) tumors.

[0170] As described in detail below, 7 of the top 10 genes overexpressed in primary resistant tumors were cancer-germline antigens (CGA's), ranging from 60-180 fold enrichment. All 7 CGA's clustered tightly together within a narrow 75 kb region of chromosome Xq28. This pattern was clinically validated in Cohort 2 where this specific CGA cluster was similarly enriched in primary resistant tumors. Importantly, this pattern was biologically validated by finding that genes associated with clinical resistance from Cohort 1 significantly overlapped with genes associated with Xq28-CGA cluster expression in The Cancer Genome Atlas (TCGA) melanoma samples, further supporting the association of Xq28 expression with clinical resistance. As described in detail below, TCGA melanoma samples with high expression of the Xq28 CGA locus exhibited profound global hypomethylation, implicating epigenomic dysregulation and overexpression of Xq28 cancer testis antigen (CTA) in primary resistance to CTLA4 blockade.

[0171] Moreover, as described in detail below, in patients with clinical benefit, microRNA-211 was enriched over 700-fold, with statistically significant overlap observed between genes associated with clinical response and those associated with miR-211 in TCGA. The Xq28 associated CGA and miR-211 expression signatures were unique to CTLA4 blockade and did not predict outcome to anti-PD1 therapy. Expression levels of Xq28 associated CGAs and miR-211 predicted clinical outcome with 100% sensitivity and 40% specificity, outperforming previously identified correlates of benefit (ROC curve AUC=0.85). Expression of a coordinately transcribed cluster of 7 cancer germline antigens on chromosome Xq28 and miR-211 was strongly associated with resistance and response to anti-CTLA4 therapy respectively in metastatic melanoma. Thus, evaluation of transcriptional activity of these genes informs therapeutic preference in this disease.

[0172] Antibodies targeting the CTLA4 pathway in advanced melanoma have yielded durable clinical benefit in a minority of patients. Moreover, the combination of CTLA4 blockade with antagonists to another “immune checkpoint,” the programmed death (PD-1) pathway, increases response rates in metastatic melanoma compared with either agent alone, suggesting the potential for combining CTLA4 blockade with other immunotherapeutics. However, prior to the invention described herein, robust determinants of response and resistance to CTLA4 blockade were elusive, hindering efforts to rationally combine it with other therapies and precisely pair it with patients likely to respond.

[0173] Several investigators have identified genomic and transcriptional markers, such as the overall number of somatic mutations, number and clonality of tumor-specific “neoantigens,” and expression of immune genes, to correspond with response. However, the extensive overlap of these molecular signatures between responding and nonresponding tumors precludes their use in predicting clinical outcome. In preclinical studies, epigenetic programs have modulated response to anti-CTLA4 therapy, but prior to the invention described herein, they have not been investigated in large clinical cohorts. To date, discovery of robust predictive molecular signatures have been limited by sample size and lack of validation cohorts. As described in detail below, to interrogate and identify non-genomic determinants of clinical outcome to CTLA4 blockade in advanced melanoma, transcriptomic data from two previously reported clinical treatment cohorts as well as transcriptomic and DNA methylation data from The Cancer Genome Atlas (TCGA) was aggregated and analyzed.

[0174] Both as monotherapy and in combination with PD-1 blockade, anti-CTLA4 antibodies have induced substantial clinical benefit in melanoma; yet, prior to the invention described herein, robust molecular signatures of clinical outcome were elusive. Moreover, insight into mechanisms of primary clinical resistance was lacking. Knowledge of both is critical given the increasing evaluation of CTLA4 blockade in hematologic malignancies and the need to both rationally design combinatorial strategies as well as identify new immunotherapeutic targets. Here, the importance of in situ transcriptomic analyses to uncover immunotherapeutically relevant biology was revealed.

[0175] In particular, as described in detail below, a critical genomic locus on Xq28 that harbors a coordinately regulated cluster of CT antigens was identified. The striking enrichment of these genes with primary resistance affirms their status as a recent therapeutic target; the encoded proteins have been implicated in the ubiquitination of key tumor suppressors—notably TP53 and AMPK—that contributed to oncogenesis. In fact, these CT antigens specifically cluster in an inverted repeat DNA structure on Xq28, in which they are expressed coordinately and independently from CT antigens outside of this cluster. Thus, the finding that all of these genes appear as the most upregulated genes in resistant tumors reinforces their relevance as a genomic unit to clinical outcome to CTLA4 blockade.

[0176] As described in detail below, a co-enrichment of immunosuppressive pathways was identified along with these CT antigens, including the PSG genes as well as the GABA A receptor, which was recently implicated in attenuating T cell priming—a process also governed by the CTLA4 pathway. Associated immunosuppression may explain the long history of failed immunotherapeutic approaches targeting CT antigens such as MAGEA3 and MAGEA6 that lie within the Xq28 locus. The finding of multiple genes involved in epithelial-to-mesenchymal transition (EMT) is consistent with preclinical data suggesting EMT as an immunoevasive pathway employed by melanomas. Moreover, using TCGA data, global hypomethylation patterns were identified that strongly associated with high expression of CTA's from the Xq28 locus, implicating epigenomic mechanisms of resistance to CTLA4 blockade.

[0177] In responding tumors, the analysis revealed enrichment of the melanoma-suppressive miR-211 and a diversity of immune effectors, including T cells, B cells, macrophages, and eosinophils. miR-211 has been shown to inhibit TGF-beta signaling members (which were upregulated in resistant tumors), suppress the EMT phenotype, and mitigate the invasive phenotype. An increased number of genes mapping to both T cell and B cell receptors were identified, implicating an active adaptive immune response that appears to be diverse in its antigen recognition.

[0178] Although statistical stringency was relaxed because of the small cohort, the converging results from alternative cohorts bolster the results presented herein. Given that CTLA4 blockade may impact immune priming as opposed to the effector arm (influenced by the PD1 pathway), the results presented herein shed light into the mechanisms governing response/resistance to therapeutic manipulation of immune priming. The results presented herein indicate that response/resistance mechanisms to immune priming differ substantially from those relevant to clinical manipulation of effector immunity. As immunotherapeutic combinations are increasingly evaluated, understanding these mechanisms are important for precisely pairing patients with the appropriate combinations to avoid toxicity and ensure efficacy. The gene signatures described herein are potential therapeutic targets to sensitize to or combine with CTLA4 blockade.

[0179] Moreover, precisely pairing patients with cancer to the appropriate immunotherapy would reduce toxicity and costs as well as accelerate drug development. While ipilimumab as a single agent can induce durable tumor remissions in metastatic melanoma, only about 15-20% of patients with melanoma will benefit. Thus the majority of patients with melanoma are already resistant to ipilimumab. The results presented herein not only suggest a combination of immunotherapies that would raise this response rate, but they identify a signature to select those patients that would benefit from the combination (e.g. CTLA4 blockade+HMGB1 receptor agonist; or CTLA4 blockade+Xq28-CGA antagonist) over monotherapy. For example, a patient with high expression of the CGA gene would be assigned to the CTLA4 blockade+HMGB1 receptor agonist combination (or CTLA4 blockade+Xq28-CGA antagonist combination), whereas a patient with low expression of the CGA gene would be assigned to anti-CTLA4 monotherapy.

### Melanoma

[0180] Cancer starts when cells in the body begin to grow out of control. Cells in nearly any part of the body can become cancer, and can then spread to other areas of the body. Melanoma is a cancer that usually starts in a certain type of skin cell, i.e., melanocytes. Melanocytes make a brown pigment called melanin, which gives the skin its tan or brown color. Melanin protects the deeper layers of the skin from some of the harmful effects of the sun. For most people, when skin is exposed to the sun, melanocytes make more melanin, causing the skin to tan or darken.

[0181] Other names for “melanoma” include malignant melanoma and cutaneous melanoma. Most melanoma cells still make melanin, so melanoma tumors are usually brown or black. However, some melanomas do not make melanin and can appear pink, tan, or even white. Melanomas can develop anywhere on the skin, but they are more likely to start on the trunk (chest and back) in men and on the legs in women. The neck and face are other common sites. Having darkly pigmented skin lowers the risk of melanoma at these more common sites, but anyone can get melanoma on the palms of the hands, soles of the feet, and under the nails. Melanomas can also form in other parts of the body such as the eyes, mouth, genitals, and anal area, but these are much less common than melanoma of the skin. Melanoma is much less common than basal cell and squamous cell skin cancers. However, melanoma is more dangerous because it is much more likely to spread to other parts of the body if not caught early.

[0182] The primary cause of melanoma is ultraviolet light (UV) exposure in those with low levels of skin pigment. The UV light may be from either the sun or from other sources, such as tanning devices. About 25% develop from moles. Those with many moles, a history of affected family members, and who have poor immune function are at greater risk. A number of rare genetic defects such as xeroderma pigmentosum also increase risk. Avoiding UV light and the use of sunscreen may prevent melanoma.

[0183] Melanoma may spread to other sites in the body by metastais. Metastatic melanoma may cause nonspecific paraneoplastic symptoms, including loss of appetite, nausea, vomiting and fatigue. Metastasis of early melanoma is possible, but relatively rare: less than a fifth of melanomas diagnosed early become metastatic. Brain metastases are particularly common in patients with metastatic melanoma. Melanoma may also spread to the liver, bones, abdomen or distant lymph nodes.

### Melanoma Diagnosis

[0184] Visual inspection is the most common diagnostic technique. Moles that are irregular in color or shape are typically treated as candidates. To detect melanomas (and increase survival rates), it is recommended to regularly examine moles for changes (shape, size, color, itching or bleeding) and to consult a qualified physician when a candidate appears.

[0185] Early signs of melanoma are changes to the shape or color of existing moles or, in the case of nodular melanoma, the appearance of a new lump anywhere on the skin. At later stages, the mole may itch, ulcerate or bleed. Early signs of melanoma are summarized by the mnemonic “ABCDE”:
[0186] Asymmetry
[0187] Borders (irregular with edges and corners)
[0188] Color (variegated)
[0189] Diameter (greater than 6 mm (0.24 in), about the size of a pencil eraser)
[0190] Evolving over time

[0191] These classifications do not, however, apply to the most dangerous form of melanoma, nodular melanoma, which has its own classifications:
[0192] Elevated above the skin surface
[0193] Firm to the touch
[0194] Growing

[0195] Following a visual examination and a dermatoscopic exam, or in vivo diagnostic tools such as a confocal microscope, the doctor may biopsy the suspicious mole. A skin biopsy performed under local anesthesia is often required to assist in making or confirming the diagnosis and in defining severity. Elliptical excisional biopsies may remove the tumor, followed by histological analysis and Breslow scoring. Punch biopsies are contraindicated in suspected melanomas, for fear of seeding tumor cells and hastening the spread of malignant cells.

[0196] Lactate dehydrogenase (LDH) tests are often used to screen for metastases, although many patients with metastases (even end-stage) have a normal LDH; extraordinarily high LDH often indicates metastatic spread of the disease to the liver.

[0197] It is common for patients diagnosed with melanoma to have chest X-rays and an LDH test, and in some cases CT, MRI, PET and/or PET/CT scans. Although controversial, sentinel lymph node biopsies and examination of the lymph nodes are also performed in patients to assess spread to the lymph nodes.

[0198] A diagnosis of melanoma is supported by the presence of the S-100 protein marker. Additionally, HMB-45 is a monoclonal antibody that reacts against an antigen present in melanocytic tumors such as melanomas. It is used in anatomic pathology as a marker for such tumors. The antibody was generated to an extract of melanoma. It reacts positively against melanocytic tumors, but not other tumors, thus demonstrating specificity and sensitivity.

[0199] The following are melanoma stages with 5 year survival rates. Stage 0: melanoma in situ (99.9% survival); Stage I/II: invasive melanoma (89-95% survival); Stage II: high risk melanoma (45-79% survival); Stage III: regional metastasis (24-70% survival); Stage IV: distant metastasis (7-19% survival).

[0200] Recent evidence suggests that the prognosis of melanoma patients with regional metastases is influenced by tumor stroma immunobiology (Akbani et al., 2015 Cell (161), 1681-1696, incorporated herein by reference).

### Melanoma Treatment

[0201] Treatment is typically removal by surgery. In those with slightly larger cancers, nearby lymph nodes may be tested for spread. Most people are cured after tumor excision if spread has not occurred. Excisional biopsies may remove the tumor, but further surgery is often necessary to reduce the risk of recurrence. Complete surgical excision with adequate surgical margins and assessment for the presence of detectable metastatic disease along with short- and long-term followup is standard. Often this is done by a wide local excision (WLE) with 1 to 2 cm margins.

[0202] For those in whom melanoma has spread, immunotherapy, biologic therapy, radiation therapy, or chemotherapy may improve survival. With treatment, the five-year survival rates in the United States is 98% among those with localized disease and 17% among those in whom spread has occurred. The likelihood that it will come back or spread depends on the melanoma thickness, how fast the cells are dividing, and whether or not the overlying skin has broken down.

[0203] Various chemotherapy agents, including temozolomide, dacarbazine (also termed DTIC), immunotherapy (with interleukin-2 (IL-2) or interferon (IFN)), as well as local perfusion, are used for treatment of melanoma. The overall success in metastatic melanoma is quite limited. Therapies for metastatic melanoma include biologic immunotherapy agents ipilimumab, pembrolizumab, and nivolumab; BRAF inhibitors, such as vemurafenib and dabrafenib; and a MEK inhibitor, trametinib.

[0204] Radiation therapy is often used after surgical resection for patients with locally or regionally advanced melanoma or for patients with unresectable distant metastases. Kilovoltage x-ray beams are often used for these treatments and have the property of the maximum radiation dose occurring close to the skin surface.

### CTLA-4-Blockade

[0205] CTLA4 or CTLA-4 (cytotoxic T-lymphocyte-associated protein 4), also known as CD152 (cluster of differentiation 152), is a protein receptor that, functioning as an immune checkpoint, downregulates immune responses. CTLA4 is constitutively expressed in regulatory T cells (Tregs), but only upregulated in conventional T cells after activation. CTLA4 acts as an “off” switch when bound to CD80 or CD86 on the surface of antigen-presenting cells. Recent reports suggest that blocking CTLA4 (using antagonistic antibodies against CTLA such as ipilimumab (FDA approved for melanoma in 2011)) results in therapeutic benefit. CTLA4 blockade inhibits immune system tolerance to tumors and provides a useful immunotherapy strategy for patients with cancer. See, Grosso J. and Jure-Kunkel M. 2013, Cancer Immun., 13: 5, incorporated herein by reference.

[0206] Ipilimumab, a fully human monoclonal antibody specific to CTLA-4, improves overall survival in metastatic melanoma patients (Ji et al., 2012 Cancer Immunol Immunother, 61: 1019-1031, incorporated herein by reference). Indeed, monoclonal antibodies directed against CTLA4, such as ipilimumab, yield considerable clinical benefit for patients with metastatic melanoma by inhibiting checkpoint activity; however, prior to the invention described herein, clinical predictors of response to these therapies were incompletely characterized (Van Allen, et al., 2015 Science, 350(6257): 207-211, incorporated herein by reference). See also, Snyder et al., 2014 The New England Journal of Medicine, 373(20): 1984, incorporated herein by reference.

### World Health Organization Criteria

[0207] The WHO Criteria for evaluating the effectiveness of anti-cancer agents on tumor shrinkage, developed in the 1970s by the International Union Against Cancer and the World Health Organization, represented the first generally agreed specific criteria for the codification of tumor response evaluation. These criteria were first published in 1981 (Miller et al., 1981 Clin Cancer Res., 47(1): 207-14, incorporated herein by reference). WHO Criteria proposed >50% tumour shrinkage for a Partial Response and >25% tumour increase for Progressive Disease.

### Response Evaluation Criteria in Solid Tumors (RECIST)

[0208] RECIST is a set of published rules that define when tumors in cancer patients improve (“respond”), stay the same (“stabilize”), or worsen (“progress”) during treatment (Eisenhauer et al., 2009 European Journal of Cancer, 45: 228-247, incorporated herein by reference). Only patients with measurably disease at baseline should be included in protocols where objective tumor response is the primary endpoint.

[0209] The response criteria for evaluation of target lesions are as follows:
[0210] Complete Response (CR): Disappearance of all target lesions.
[0211] Partial Response (PR): At least a 30% decrease in the sum of the longest diameter (LD) of target lesions, taking as reference the baseline sum LD.
[0212] Stable Disease (SD): Neither sufficient shrinkage to qualify for PR nor sufficient increase to qualify for PD, taking as reference the smallest sum LD since the treatment started.
[0213] Progressive Disease (PD): At least a 20% increase in the sum of the LD of target lesions, taking as reference the smallest sum LD recorded since the treatment started or the appearance of one or more new lesions.
[0214] The response criteria for evaluation of non-target lesions are as follows:
[0215] Complete Response (CR): Disappearance of all non-target lesions and normalization of tumor marker level.
[0216] Incomplete Response/Stable Disease (SD): Persistence of one or more non-target lesion(s) or/and maintenance of tumor marker level above the normal limits.
[0217] Progressive Disease (PD): Appearance of one or more new lesions and/or unequivocal progression of existing non-target lesions.

[0218] The response criteria for evaluation of best overall response are as follows. The best overall response is the best response recorded from the start of the treatment until disease progression/recurrence (taking as reference for PD the smallest measurements recorded since the treatment started). In general, the patient's best response assignment will depend on the achievement of both measurement and confirmation criteria.
[0219] Patients with a global deterioration of health status requiring discontinuation of treatment without objective evidence of disease progression at that time should be classified as having “symptomatic deterioration”. Every effort should be made to document the objective progression even after discontinuation of treatment.
[0220] In some circumstances, it may be difficult to distinguish residual disease from normal tissue. When the evaluation of complete response depends on this determination, it is recommended that the residual lesion be investigated (fine needle aspirate/biopsy) to confirm the complete response status.

### Immune-Related Response Criteria

[0221] The immune-related response criteria (irRC) is a set of published rules that define when tumors in cancer patients improve (“respond”), stay the same (“stabilize”), or worsen (“progress”) during treatment, where the compound being evaluated is an immuno-oncology drug. The Immune-Related Response Criteria, first published in 2009 (Wolchok et al., 2009 Clin Cancer Res, 15(23):7412, incorporated herein by reference), arose out of observations that immuno-oncology drugs would fail in clinical trials that measured responses using the WHO or RECIST Criteria, because these criteria could not account for the time gap in many patients between initial treatment and the apparent action of the immune system to reduce the tumor burden. The key driver in the development of the irRC was the observation that, in studies of various cancer therapies derived from the immune system such as cytokines and monoclonal antibodies, the looked-for Complete and Partial Responses as well as Stable Disease only occurred after an increase in tumor burden that the conventional RECIST Criteria would have dubbed “Progressive Disease’. RECIST failed to take account of the delay between dosing and an observed anti-tumour T cell response, so that otherwise ‘successful’ drugs—that is, drugs which ultimately prolonged life—failed in clinical trials.

[0222] The irRC are based on the WHO Criteria; however, the measurement of tumor burden and the assessment of immune-related response have been modified as set forth below.

### Measurement of Tumor Burden

[0223] In the irRC, tumor burden is measured by combining ‘index’ lesions with new lesions. Ordinarily, tumor burden would be measured with a limited number of ‘index’ lesions (that is, the largest identifiable lesions) at baseline, with new lesions identified at subsequent timepoints counting as ‘Progressive Disease’. In the irRC, by contrast, new lesions are a change in tumor burden. The irRC retained the bidirectional measurement of lesions that had originally been laid down in the WHO Criteria.

### Assessment of Immune-Related Response

[0224] In the irRC, an immune-related Complete Response (irCR) is the disappearance of all lesions, measured or unmeasured, and no new lesions; an immune-related Partial Response (irPR) is a 50% drop in tumor burden from baseline as defined by the irRC; and immune-related Progressive Disease (irPD) is a 25% increase in tumor burden from the lowest level recorded. Everything else is considered immune-related Stable Disease (irSD). Even if tumor burden is rising, the immune system is likely to “kick in” some months after first dosing and lead to an eventual decline in tumor burden for many patients. The 25% threshold accounts for this apparent delay.

### The Cancer Genome Atlas (TCGA)

[0225] The Cancer Genome Atlas (TCGA) is a project to catalogue genetic mutations responsible for cancer, using genome sequencing and bioinformatics (Cancer Genome Atlas N. Genomic Classification of Cutaneous Melanoma. 2015 Cell, 161(7):1681-96, incorporated herein by reference). TCGA applies high-throughput genome analysis techniques to improve the ability to diagnose, treat, and prevent cancer through a better understanding of the genetic basis of this disease.

[0226] The project scheduled 500 patient samples, more than most genomics studies, and used different techniques to analyze the patient samples. Techniques include gene expression profiling, copy number variation profiling, SNP genotyping, genome wide DNA methylation profiling, microRNA profiling, and exon sequencing of at least 1,200 genes. TCGA is sequencing the entire genomes of some tumors, including at least 6,000 candidate genes and microRNA sequences. This targeted sequencing is being performed by all three sequencing centers using hybrid-capture technology. In phase II, TCGA is performing whole exon sequencing on 80% of the cases and whole genome sequencing on 80% of the cases used in the project.

### Gene Expression Profiling

[0227] In general, methods of gene expression profiling can be divided into two large groups: methods based on hybridization analysis of polynucleotides, and methods based on sequencing of polynucleotides. Methods known in the art for the quantification of mRNA expression in a sample include northern blotting and in situ hybridization, RNAse protection assays, RNA-seq, and reverse transcription polymerase chain reaction (RT-PCR). Alternatively, antibodies are employed that recognize specific duplexes, including DNA duplexes, RNA duplexes, and DNA-RNA hybrid duplexes or DNA-protein duplexes. Representative methods for sequencing-based gene expression analysis include Serial Analysis of Gene Expression (SAGE), and gene expression analysis by massively parallel signature sequencing (MPSS). For example, RT-PCR is used to compare mRNA levels in different sample populations, in normal and tumor tissues, with or without drug treatment, to characterize patterns of gene expression, to discriminate between closely related mRNAs, and/or to analyze RNA structure.

[0228] In some cases, a first step in gene expression profiling by RT-PCR is the reverse transcription of the RNA template into cDNA, followed by amplification in a PCR reaction. For example, extracted RNA is reverse-transcribed using a GeneAmp RNA PCR kit (Perkin Elmer, Calif., USA), following the manufacturer's instructions. The cDNA is then used as template in a subsequent PCR amplification and quantitative analysis using, for example, a TaqMan® (Life Technologies, Inc., Grand Island, N.Y.) assay.

### Microarrays

[0229] Differential gene expression can also be identified, or confirmed using a microarray technique. In these methods, polynucleotide sequences of interest (including cDNAs and oligonucleotides) are plated, or arrayed, on a microchip substrate. The arrayed sequences are then hybridized with specific DNA probes from cells or tissues of interest. Just as in the RT-PCR method, the source of mRNA typically is total RNA isolated from human tumors or tumor cell lines and corresponding normal tissues or cell lines. Thus, RNA is isolated from a variety of primary tumors or tumor cell lines. If the source of mRNA is a primary tumor, mRNA is extracted from frozen or archived tissue samples.

[0230] In the microarray technique, PCR-amplified inserts of cDNA clones are applied to a substrate in a dense array. The microarrayed genes, immobilized on the microchip, are suitable for hybridization under stringent conditions.

[0231] In some cases, fluorescently labeled cDNA probes are generated through incorporation of fluorescent nucleotides by reverse transcription of RNA extracted from tissues of interest (e.g., melanoma tissue). Labeled cDNA probes applied to the chip hybridize with specificity to loci of DNA on the array. After washing to remove non-specifically bound probes, the chip is scanned by confocal laser microscopy or by another detection method, such as a charge-coupled device (CCD) camera. Quantification of hybridization of each arrayed element allows for assessment of corresponding mRNA abundance.

[0232] In some configurations, dual color fluorescence is used. With dual color fluorescence, separately labeled cDNA probes generated from two sources of RNA are hybridized pairwise to the array. The relative abundance of the transcripts from the two sources corresponding to each specified gene is thus determined simultaneously. In various configurations, the miniaturized scale of the hybridization can afford a convenient and rapid evaluation of the expression pattern for large numbers of genes. In various configurations, such methods can have sensitivity required to detect rare transcripts, which are expressed at fewer than 1000, fewer than 100, or fewer than 10 copies per cell. In various configurations, such methods can detect at least approximately two-fold differences in expression levels (Schena et al., Proc. Natl. Acad. Sci. USA 93(2): 106-149 (1996)). In various configurations, microarray analysis is performed by commercially available equipment, following manufacturer's protocols, such as by using the Affymetrix GenChip technology, or Incyte's microarray technology.

### RNA-seq

[0233] RNA sequencing (RNA-seq), also called whole transcriptome shotgun sequencing (WTSS), uses next-generation sequencing (NGS) to reveal the presence and quantity of RNA in a biological sample at a given moment in time.

[0234] RNA-Seq is used to analyze the continually changing cellular transcriptome. See, e.g., Wang et al., 2009 Nat Rev Genet, 10(1): 57-63, incorporated herein by reference. Specifically, RNA-Seq facilitates the ability to look at alternative gene spliced transcripts, post-transcriptional modifications, gene fusion, mutations/SNPs and changes in gene expression. In addition to mRNA transcripts, RNA-Seq can look at different populations of RNA to include total RNA, small RNA, such as miRNA, tRNA, and ribosomal profiling. RNA-Seq can also be used to determine exon/intron boundaries and verify or amend previously annotated 5′ and 3′ gene boundaries.

[0235] Prior to RNA-Seq, gene expression studies were done with hybridization-based microarrays. Issues with microarrays include cross-hybridization artifacts, poor quantification of lowly and highly expressed genes, and needing to know the sequence of interest. Because of these technical issues, transcriptomics transitioned to sequencing-based methods. These progressed from Sanger sequencing of Expressed Sequence Tag libraries, to chemical tag-based methods (e.g., serial analysis of gene expression), and finally to the current technology, NGS of cDNA (notably RNA-Seq).

### Gene Signature

[0236] As described here, a gene signature was defined herein, which distinguishes CTLA-4 response in melanoma patients. Also described herein is a gene signature which distinguishes response to a combination of CTLA-4 blockade and a TLR (or autophagy) agonist. Exemplary distinguishing genes are provided below.

[0237] An exemplary human MAGEA2 amino acid sequence is set forth below (SEQ ID NO: 1; GenBank Accession No: NP_001269434, Version 1, incorporated herein by reference):

| | |
|---|---|
| 1 | mpleqrsqhc kpeeglearg ealglvgaqa pateeqqtas ssstlvevtl gevpaadsps |
| 61 | pphspqgass fsttinytlw rqsdegssnq eeegprmfpd lesefqaais rkmvelvhfl |
| 121 | llkyrarepv tkaemlesvl rncqdffpvi fskaseylql vfgievvevv pishlyilvt |
| 181 | clglsydgll gdnqvmpktg lliivlaiia iegdcapeek iweelsmlev fegredsvfa |
| 241 | hprkllmqdl vqenyleyrq vpgsdpacye flwgpralie tsyvkvlhht lkiggephis |
| 301 | ypplheralr egee |

[0238] An exemplary human MAGEA2 nucleic acid sequence is set forth below (SEQ ID NO: 2; GenBank Accession No: NM_001282505, Version 1, incorporated herein by reference):

| | |
|---|---|
| 1 | ttgcgcattg gaggtcagag gacagcgaga ttctcgccct gagcaacggc ctgacgtcgg |
| 61 | cggagggaag caggcgcagg ctccgtgagg aggcaaggcc tgtgggtctt cattgcccag |
| 121 | ctcctgcccg cactcctgcc tgctgccctg accagagtca tcatgcctct tgagcagagg |
| 181 | agtcagcact gcaagcctga agaaggcctt gaggcccgag gagaggccct gggcctggtg |
| 241 | ggtgcgcagg ctcctgctac tgaggagcag cagaccgctt cttcctcttc tactctagtg |
| 301 | gaagttaccc tgggggaggt gcctgctgcc gactcaccga gtcctcccca cagtcctcag |
| 361 | ggagcctcca gcttctcgac taccatcaac tacactcttt ggagacaatc cgatgagggc |
| 421 | tccagcaacc aagaagagga ggggccaaga atgtttcccg acctggagtc cgagttccaa |
| 481 | gcagcaatca gtaggaagat ggttgagttg gttcattttc tgctcctcaa gtatcgagcc |
| 541 | agggagccgg tcacaaaggc agaaatgctg gagagtgtcc tcagaaattg ccaggacttc |
| 601 | tttcccgtga tcttcagcaa agcctccgag tacttgcagc tggtctttgg catcgaggtg |
| 661 | gtggaagtgg tccccatcag ccacttgtac atccttgtca cctgcctggg cctctcctac |
| 721 | gatggcctgc tgggcgacaa tcaggtcatg cccaagacag gcctcctgat aatcgtcctg |
| 781 | gccataatcg caatagaggg cgactgtgcc cctgaggaga aaatctggga ggagctgagt |
| 841 | atgttggagg tgtttgaggg gagggaggac agtgtcttcg cacatcccag gaagctgctc |
| 901 | atgcaagatc tggtgcagga aaactacctg gagtaccggc aggtgcccgg cagtgatcct |
| 961 | gcatgctacg agttcctgtg gggtccaagg gccctcattg aaaccagcta tgtgaaagtc |
| 1021 | ctgcaccata cactaaagat cggtggagaa cctcacattt cctacccacc cctgcatgaa |
| 1081 | cgggctttga gagagggaga agagtgagtc tcagcacatg ttgcagccag ggccagtggg |
| 1141 | agggggtctg ggccagtgca ccttccaggg ccccatccat tagcttccac tgcctcgtgt |
| 1201 | gatatgaggc ccattcctgc ctctttgaag agagcagtca gcattcttag cagtgagttt |
| 1261 | ctgttctgtt ggatgacttt gagatttatc tttgtttcct gttggaattg ttcaaatgtt |
| 1321 | ccttttaaca aatggttgga tgaacttcag catccaagtt tatgaatgac agtagtcaca |
| 1381 | catagtgctg tttatatagt ttaggggtaa gagtcctgtt ttttattcag attgggaaat |
| 1441 | ccattccatt ttgtgagttg tcacataata acagcagtgg aatatgtatt tgcctatatt |
| 1501 | gtgaacgaat tagcagtaaa atacatgata caaggaactc aaaagatagt taattcttgc |
| 1561 | cttatacctc agtctattat gtaaaattaa aaatatgtgt atgtttttgc ttctttgaga |
| 1621 | atgcaaaaga aattaaatct gaataaataa ttcttcctgt tcaaaaaaaa aaaaaaaaaa |

[0239] An exemplary human MAGEA3 amino acid sequence is set forth below (SEQ ID NO: 3; GenBank Accession No: CAG46566.1, Version 1, incorporated herein by reference):

| | |
|---|---|
| 1 | mpleqrsqhc kpeeglearg ealglvgaqa pateeqeaas ssstivevtl gevpaaespd |
| 61 | ppqspqgass lpttmnyplw sqsyedssnq eeegpstfpd lesefqaals rkvaelvhfl |
| 121 | llkyrarepv tkaemlgsvv gnwqyffpvi fskassslql vfgielmevd pighlyifat |
| 181 | clglsydgll gdnqimpkag lliivlaiia regdcapeek iweelsvlev fegredsilg |
| 241 | dpkklltqhf vqenyleyrq vpgsdpacye flwgpralve tsyvkvlhhm vkisggphis |
| 301 | ypplhewvlr egee |

[0240] An exemplary human MAGEA3 nucleic acid sequence is set forth below (SEQ ID NO: 4; GenBank Accession No: NM_005362.3, Version 3, incorporated herein by reference):

| | |
|---|---|
| 1 | gagattctcg ccctgagcaa cgagcgacgg cctgacgtcg gcggagggaa gccggcccag |
| 61 | gctcggtgag gaggcaaggt tctgagggga caggctgacc tggaggacca gaggcccccg |
| 121 | gaggagcact gaaggagaag atctgccagt gggtctccat tgcccagctc ctgcccacac |
| 181 | tcccgcctgt tgccctgacc agagtcatca tgcctcttga gcagaggagt cagcactgca |
| 241 | agcctgaaga aggccttgag gcccgaggag aggccctggg cctggtgggt gcgcaggctc |
| 301 | ctgctactga ggagcaggag gctgcctcct cctcttctac tctagttgaa gtcaccctgg |
| 361 | gggaggtgcc tgctgccgag tcaccagatc ctccccagag tcctcaggga gcctccagcc |
| 421 | tccccactac catgaactac cctctctgga gccaatccta tgaggactcc agcaaccaag |
| 481 | aagaggaggg gccaagcacc ttccctgacc tggagtccga gttccaagca gcactcagta |
| 541 | ggaaggtggc cgagttggtt cattttctgc tcctcaagta tcgagccagg gagccggtca |
| 601 | caaaggcaga aatgctgggg agtgtcgtcg gaaattggca gtatttcttt cctgtgatct |
| 661 | tcagcaaagc ttccagttcc ttgcagctgg tctttggcat cgagctgatg gaagtggacc |
| 721 | ccatcggcca cttgtacatc tttgccacct gcctgggcct ctcctacgat ggcctgctgg |
| 781 | gtgacaatca gatcatgccc aaggcaggcc tcctgataat cgtcctggcc ataatcgcaa |
| 841 | gagagggcga ctgtgcccct gaggagaaaa tctgggagga gctgagtgtg ttagaggtgt |
| 901 | ttgaggggag ggaagacagt atcttggggg atcccaagaa gctgctcacc caacatttcg |
| 961 | tgcaggaaaa ctacctggag taccggcagg tccccggcag tgatcctgca tgttatgaat |
| 1021 | tcctgtgggg tccaagggcc ctcgttgaaa ccagctatgt gaaagtcctg caccatatgg |
| 1081 | taaagatcag tggaggacct cacatttcct acccacccct gcatgagtgg gttttgagag |
| 1141 | agggggaaga gtgagtctga gcacgagttg cagccagggc cagtgggagg gggtctgggc |
| 1201 | cagtgcacct tccggggccg catcccttag tttccactgc ctcctgtgac gtgaggccca |
| 1261 | ttcttcactc tttgaagcga gcagtcagca ttcttagtag tgggtttctg ttctgttgga |
| 1321 | tgactttgag attattcttt gtttcctgtt ggagttgttc aaatgttcct tttaacggat |
| 1381 | ggttgaatga gcgtcagcat ccaggtttat gaatgacagt agtcacacat agtgctgttt |
| 1441 | atatagttta ggagtaagag tcttgttttt tactcaaatt gggaaatcca ttccattttg |
| 1501 | tgaattgtga cataataata gcagtggtaa aagtatttgc ttaaaattgt gagcgaatta |
| 1561 | gcaataacat acatgagata actcaagaaa tcaaaagata gttgattctt gccttgtacc |
| 1621 | tcaatctatt ctgtaaaatt aaacaaatat gcaaaccagg atttccttga cttctttgag |
| 1681 | aatgcaagcg aaattaaatc tgaataaata attcttcctc ttcaaaaaaa aaaaaaaaaa |
| 1741 | aaaaaaaaaa aaa |

[0241] An exemplary human MAGEA6 amino acid sequence is set forth below (SEQ ID NO: 5; GenBank Accession No: CAG46567.1, Version 1, incorporated herein by reference):

| | |
|---|---|
| 1 | mpleqrsqhc kpeeglearg ealglvgaqa pateeqeaas ssstlvevtl gevpaaespd |
| 61 | ppgspqgass lpttmnyplw sqsyedssnq eeegpstfpd lesefqaals rkvaklvhfl |
| 121 | llkyrarepv tkaemlgsvv gnwqyffpvi fskasdslql vfgielmevd pighvyifat |
| 181 | clglsydgll gdnqimpktg fliiilaiia kegdcapeek iweelsvlev fegredsifg |
| 241 | dpkklltqyf vqenyleyrq vpgsdpacye flwgpralie tsyvkvlhhm vkisggpris |
| 301 | ypllhewafr egee |

[0242] An exemplary human MAGEA6 nucleic acid sequence is set forth below (SEQ ID NO: 6; GenBank Accession No: NM_005362.3, Version 3, incorporated herein by reference):

| | |
|---|---|
| 1 | gagattctcg ccctgagcaa cgagcgacgg cctgacgtcg gcggagggaa gccggcccag |
| 61 | gctcggtgag gaggcaaggt tctgagggga caggctgacc tggaggacca gaggcccccg |
| 121 | gaggagcact gaaggagaag atctgccagt gggtctccat tgcccagctc ctgcccacac |
| 181 | tcccgcctgt tgccctgacc agagtcatca tgcctcttga gcagaggagt cagcactgca |
| 241 | agcctgaaga aggccttgag gcccgaggag aggccctggg cctggtgggt gcgcaggctc |
| 301 | ctgctactga ggagcaggag gctgcctcct cctcttctac tctagttgaa gtcaccctgg |
| 361 | gggaggtgcc tgctgccgag tcaccagatc ctccccagag tcctcaggga gcctccagcc |
| 421 | tccccactac catgaactac cctctctgga gccaatccta tgaggactcc agcaaccaag |
| 481 | aagaggaggg gccaagcacc ttccctgacc tggagtccga gttccaagca gcactcagta |
| 541 | ggaaggtggc cgagttggtt cattttctgc tcctcaagta tcgagccagg gagccggtca |
| 601 | caaaggcaga aatgctgggg agtgtcgtcg gaaattggca gtatttcttt cctgtgatct |
| 661 | tcagcaaagc ttccagttcc ttgcagctgg tctttggcat cgagctgatg gaagtggacc |
| 721 | ccatcggcca cttgtacatc tttgccacct gcctgggcct ctcctacgat ggcctgctgg |
| 781 | gtgacaatca gatcatgccc aaggcaggcc tcctgataat cgtcctggcc ataatcgcaa |
| 841 | gagagggcga ctgtgcccct gaggagaaaa tctgggagga gctgagtgtg ttagaggtgt |
| 901 | ttgaggggag ggaagacagt atcttggggg atcccaagaa gctgctcacc caacatttcg |
| 961 | tgcaggaaaa ctacctggag taccggcagg tccccggcag tgatcctgca tgttatgaat |
| 1021 | tcctgtgggg tccaagggcc ctcgttgaaa ccagctatgt gaaagtcctg caccatatgg |
| 1081 | taaagatcag tggaggacct cacatttcct acccacccct gcatgagtgg gttttgagag |
| 1141 | agggggaaga gtgagtctga gcacgagttg cagccagggc cagtgggagg gggtctgggc |
| 1201 | cagtgcacct tccggggccg catcccttag tttccactgc ctcctgtgac gtgaggccca |
| 1261 | ttcttcactc tttgaagcga gcagtcagca ttcttagtag tgggtttctg ttctgttgga |
| 1321 | tgactttgag attattcttt gtttcctgtt ggagttgttc aaatgttcct tttaacggat |
| 1381 | ggttgaatga gcgtcagcat ccaggtttat gaatgacagt agtcacacat agtgctgttt |
| 1441 | atatagttta ggagtaagag tcttgttttt tactcaaatt gggaaatcca ttccattttg |
| 1501 | tgaattgtga cataataata gcagtggtaa aagtatttgc ttaaaattgt gagcgaatta |
| 1561 | gcaataacat acatgagata actcaagaaa tcaaaagata gttgattctt gccttgtacc |
| 1621 | tcaatctatt ctgtaaaatt aaacaaatat gcaaaccagg atttccttga cttctttgag |
| 1681 | aatgcaagcg aaattaaatc tgaataaata attcttcctc ttcaaaaaaa aaaaaaaaaa |
| 1741 | aaaaaaaaaa aaa |

[0243] An exemplary human MAGEA12 amino acid sequence is set forth below (SEQ ID NO: 7; GenBank Accession No: EAW99432.1, Version 1, incorporated herein by reference):

| | |
|---|---|
| 1 | mpleqrsqhc kpeegleaqg ealglvgaqa pateeqetas ssstlvevtl revpaaesps |
| 61 | pphspqgast lpttinytlw sqsdegssne eqegpstfpd letsfqvals rkmaelvhfl |
| 121 | llkyrarepf tkaemlgsvi rnfqdffpvi fskaseylql vfgievvevv righlyilvt |
| 181 | clglsydgll gdnqivpktg lliivlaiia kegdcapeek iweelsvlea sdgredsvfa |
| 241 | hprklltqdl vqenyleyrq vpgsdpacye flwgpralve tsyvkvlhhl lkisggphis |
| 301 | ypplhewafr egee |

[0244] An exemplary human MAGEA12 nucleic acid sequence is set forth below (SEQ ID NO: 8; GenBank Accession No: NM_001166386.3, Version 3, incorporated herein by reference):

| | |
|---|---|
| 1 | aagatgccga gggaggactg aggcgggcct caccccagac agagggcccc caataatcca |
| 61 | gcgctgcctc tgctgccggg cctggaccac cctgcagggg aagacttctc aggctgagtc |
| 121 | gccaccacct caccccgcca ccccccgccg ctttaaccgc agggaactct ggtatctcag |
| 181 | ggagttgagg accttttctt cagagggtga ctcaggtcaa cacaggggcc cccatgtagt |
| 241 | cgacagacac agtggtccta agatctacca agcatccagg ttctgaggag acaggccccg |
| 301 | gagcagcact agctcctgcc cacactccta cctgctgccc tgaccagagt catcatgcca |
| 361 | cttgagcaga ggagtcagca ctgcaagcct gaggaaggcc ttgaggccca aggagaggcc |
| 421 | ctgggcttgg tgggtgcgca ggctcctgct actgaggagc aggagactgc ctcctcctcc |
| 481 | tctactctag tggaagtcac cctgcgggag gtgcctgctg ccgagtcacc aagtcctccc |
| 541 | cacagtcctc agggagcctc caccctcccc actaccatca actatactct ctggagtcaa |
| 601 | tccgatgagg gctccagcaa cgaagaacag gaagggccaa gcacctttcc tgacctggag |
| 661 | acgagcttcc aagtagcact cagtaggaag atggctgagt tggttcattt tctgctcctc |
| 721 | aagtatcgag ccagggagcc attcacaaag gcagaaatgc tggggagtgt catcagaaat |
| 781 | ttccaggact tctttcctgt gatcttcagc aaagcctccg agtacttgca gctggtcttt |
| 841 | ggcatcgagg tggtggaagt ggtccgcatc ggccacttgt acatccttgt cacctgcctg |
| 901 | ggcctctcct acgatggcct gctgggcgac aatcagatcg tgcccaagac aggcctcctg |
| 961 | ataatcgtcc tggccataat cgcaaaagag ggcgactgtg cccctgagga gaaaatctgg |
| 1021 | gaggagctga gtgtgttgga ggcatctgat gggagggagg acagtgtctt tgcgcatccc |
| 1081 | aggaagctgc tcacccaaga tttggtgcag gaaaactacc tggagtaccg gcaggtcccc |
| 1141 | ggcagtgatc ctgcatgcta cgagttcctg tggggtccaa gggccctcgt tgaaaccagc |
| 1201 | tatgtgaaag tcctgcacca tttgctaaag atcagtggag gacctcacat ttcctaccca |
| 1261 | cccctgcatg aatgggcttt tagagagggg gaagagtgag tctgagcacg agttgcagcc |
| 1321 | agggccagtg ggagggggtc tgggccagtg caccttccaa ggccccatcc attagtttcc |
| 1381 | actgcctcgt gtgacatgag gcccattctt cactctttga agagagcagt cagtattgtt |
| 1441 | agtagtgagt ttctgttcta ttggatgact ttgagattta tctttgtttc ctgttggaat |
| 1501 | tgttcaaatg ttccttttaa cggatggttg aatgaacttc agcatccaag tttatgaatg |
| 1561 | acagtagtca cacatagtgc tgtttatata gtttaggagt aagagtgttg ttttttattc |
| 1621 | agattgggaa atccattcca ttttgtgaat tgtgacaaat aacagcagtg gaaaaagtat |
| 1681 | gtgcttagaa ttgtgaaaga attagcagta aaatacatga gataaagacc tcaagaagtt |
| 1741 | aaaagatact taattcttgc cttatacctc actctattct gtaaatttga aaaaaaagca |
| 1801 | tggatacctg gatatccttg gcttctttga gaatttaaga gaaattaaat ctgaataaat |
| 1861 | aa |

[0245] An exemplary human CSAG1 amino acid sequence is set forth below (SEQ ID NO: 9; GenBank Accession No: AAH59947.1, Version 1, incorporated herein by reference):

| | |
|---|---|
| 1 | msattacwpa ftvlgeargd qvdwsrlyrd tglvkmsrkp rasspfsnnh pstpkrfprq |
| 61 | prrekgpvke vpgtkgsp |

[0246] An exemplary human CSAG1 nucleic acid sequence is set forth below (SEQ ID NO: 10; GenBank Accession No: BC059947.1, Version 1, incorporated herein by reference):

| | |
|---|---|
| 1 | ctggattctt cctggatggg gatccagatg gaggtggagg gttgatttgg gaagcagagc |
| 61 | acagcagccc aaatttgctt gtaatgtcgg cgactacagc ctgctggcct gccttcactg |
| 121 | tcctggggga agctcgggga gaccaggtgg actggagtag actgtacaga gacactggtc |
| 181 | tggtgaagat gtccaggaaa ccacgagcct ccagcccatt ttccaacaac cacccatcaa |
| 241 | caccaaagag gttcccaaga caacccagaa gggaaaaggg acccgtcaag gaagttccag |
| 301 | gaacaaaagg ctctccctaa aagaccaccg cttcaaaaaa acctgaggaa tggagtgggc |
| 361 | caacactatc cagccactct gaccagccga acgaggaact caatcaaaat gcgccatagc |
| 421 | aggaccacaa gggcaaggag accaccgcct tctccagtgc ttccttgggc agccagtaat |
| 481 | tcccaggcaa ggccagagac ttcaagtcta tctgaaaagt ctccagaagt ctaaccccag |
| 541 | ataaatagcc aacagggtgt agagtacgtt ttacacccca aagggtatgc cccatggtga |
| 601 | tggaaataaa atgaacatgt tgtaaaaaaa aaaaaaaaaa aaa |

[0247] An exemplary human CSAG2 amino acid sequence is set forth below (SEQ ID NO: 11; GenBank Accession No: EAW99427.1, Version 1, incorporated herein by reference):

| | |
|---|---|
| 1 | mwmgliqlve gvkrkdqgfl ekefyhktni kmrceflacw paftvlgeaw rdqvdwsrll |
| 61 | rdaglvkmsr kprassplsn nhpptpkrrg sgrhpinpgp ealskfprqp grekgpikev |
| 121 | pgtkgsp |

[0248] An exemplary human CSAG2 nucleic acid sequence is set forth below (SEQ ID NO: 12; GenBank Accession No: AJ844639.1, Version 1, incorporated herein by reference):

| | |
|---|---|
| 1 | agttccagga acaaaaggct ctccctaaaa gaccgccgct tcaaaaaaac ctgaggaatg |
| 61 | gagtgggcca acactatcca gccactctga ccagccgaac gaggaactca atcaaaatga |
| 121 | gccatagcgg gaccacaagg gcaaggagac caccaccttc tccagtctct cttcggacag |
| 181 | ccagtaattc ccgggcaagg ccagagactt caa |

[0249] An exemplary human CSAG3 amino acid sequence is set forth below (SEQ ID NO: 13; GenBank Accession No: AAI19736.1, Version 1, incorporated herein by reference):

| | |
|---|---|
| 1 | mwmgliqlve gvkrkdqgfl ekefyhktni kmrceflacw paftvlgeaw rdqvdwsrll |
| 61 | rdaglvkmsr kprassplsn nhpptpkrfp rqpgrekgpi kevpgtkgsp |

[0250] An exemplary human CSAG3 nucleic acid sequence is set forth below (SEQ ID NO: 14; GenBank Accession No: NM_001129826.2, Version 2, incorporated herein by reference):

| | |
|---|---|
| 1 | gtgcaatggc tagtactatg tgtcaacttg tctaggctat actgctcagc tgtgtggtca |
| 61 | aacagtagtc tagatgttgc tgtgaaggta ttttgtagat gtgatcaaca tttacaatca |
| 121 | gttgatttta agtaaagcag tttaacttcc ataatgtgga tgggcctcat ccaattagtt |
| 181 | gaaggtgtta agagaaaaga ccaaggtttc ctggaaaagg aattctacca caagactaac |
| 241 | ataaaaatgc gctgtgagtt tctagcctgc tggcctgcct tcactgtcct gggggaggct |
| 301 | tggagagacc aggtggactg gagtagactg ttgagagacg ctggtctggt gaagatgtcc |
| 361 | aggaaaccac gagcctccag cccattgtcc aacaaccacc caccaacacc aaagaggcga |
| 421 | ggaagtggaa ggcatcctct caaccctggc ccagaagccc tatcaaagtt cccaagacaa |
| 481 | cccggaaggg aaaagggacc catcaaggaa gttccaggaa caaaaggctc tccctaaaag |
| 541 | accgccgctt caaaaaaacc tgaggaatgg agtgggccaa cactatccag ccactctgac |
| 601 | cagccgaacg aggaactcaa tcaaaatgag ccatagcggg accacaaggg caaggagacc |
| 661 | accaccttct ccagtctctc ttcggacagc cagtaattcc cgggcaaggc cagagacttc |
| 721 | aagtctatct gaaaagtctc cagaggtcta accccagata aatagccaac agggtgtaga |
| 781 | gtacatttta caccccaaag agtgtgcccc atggtgatga aaataaagtg aacatgttgc |
| 841 | aaaatga |

[0251] An exemplary human PSG1 amino acid sequence is set forth below (SEQ ID NO: 15; GenBank Accession No: AAH58285.1, Version 1, incorporated herein by reference):

| | |
|---|---|
| 1 | mgtlsappct qrikwkglll tasllnfwnl pttaqvtiea eptkvsegkd vlllvhnlpq |
| 61 | nltgyiwykg qmrdlyhyit syvvdgeiii ygpaysgret aysnaslliq nvtredagsy |
| 121 | tlhiikgddg trgvtgrftf tlhletpkps isssnlnpre tmeaysltcd petpdasylw |
| 181 | wmngqslpmt hslklsetnr tlfllgvtky tagpyeceir npvsasrsdp vtlnllpklp |
| 241 | kpyitinnln prenkdvinf tcepksenyt yiwwlngqsl pvsprvkrpi enrililpsv |
| 301 | trnetgpyqc eirdryggir sdpvtlnvly gpdlpriyps ftyyrsgevl ylscsadsnp |
| 361 | paqyswtine kfqlpgqklf irhittkhsg lyvcsvrnsa tgkessksmt vevsdwtvp |

[0252] An exemplary human PSG1 nucleic acid sequence is set forth below (SEQ ID NO: 16; GenBank Accession No: M93704.1, Version 1, incorporated herein by reference):

| | |
|---|---|
| 1 | cgaagctgcc caagccctac atcaccatca acaacttaaa ccccagggag aataaggatg |
| 61 | tcttaaactt cacctgtgaa cctaagagtg agaactacac ctacatttcg tggctaaatg |
| 121 | gtcagagcct cccggtcagt cccagggtaa agcgacccat tgaaaacagg atcctcattc |
| 181 | tacccagtgt cacgagaaat gaaacaggac cctatcaatg tgaaatacgg gaccgatatg |
| 241 | gtggcatccg cagtgaccca gtcaccctga atgtcctct |

[0253] An exemplary human PSG2 amino acid sequence is set forth below (SEQ ID NO: 17; GenBank Accession No: AAH22316.1, Version 1, incorporated herein by reference):

| | |
|---|---|
| 1 | mgplsappct ehikwkglll tasllnfwnl pttaqvtiea qppkvsegkd vlllvhnlpq |
| 61 | nltgyiwykg qirdlyhyit syvvdgqiii ygpaysgret aysnaslliq nvtredagsy |
| 121 | tlhiikrgdg trgvtgyftf tlyletpkps isssnlnpre ametviltcd petpdtsyqw |
| 181 | wmnggslpmt hrfqlsetnr tlflfgvtky tagpyeceir nsgsasrsdp vtlnllhgpd |
| 241 | lprihpsytn yrsgdnlyls cfansnppaq yswtingkfq gsgqnlfipq ittkhsglyv |
| 301 | csvrnsatge esstsltvkv sastrigllp llnpt |

[0254] An exemplary human PSG2 nucleic acid sequence is set forth below (SEQ ID NO: 18; GenBank Accession No: NM_031246.3, Version 3, incorporated herein by reference):

| | |
|---|---|
| 1 | gacagagagg tgtcctgggc ctgaccccac ccatgagcct gggaattgct gctgccccag |
| 61 | gaagaggctc agtgcagaag gaggaaggac agcacagctg acagccgtgc tcaggaagtt |
| 121 | tctggatcct aggctcatct ccacagagga gaacacacag gcagcagaga ccatggggcc |
| 181 | cctctcagcc cctccctgca cagagcacat caaatggaag gggctcctgg tcacagcatc |
| 241 | acttttaaac ttctggaacc tgcccaccac tgcccaagtc acgattgaag cccagccacc |
| 301 | aaaagtttcc gaggggaagg atgttcttct acttgtccac aatttgcccc agaatcttac |
| 361 | tggctacatc tggtacaaag ggcaaatcag ggacctctac cattacatta catcatatgt |
| 421 | agtagacggt caaataatta tatatgggcc tgcatatagt ggacgagaaa cagcatattc |
| 481 | caatgcatcc ctgctgatcc agaatgtcac ccgggaggac gcaggatcct acaccttaca |
| 541 | catcataaag cgaggtgatg ggactagagg agtaactgga tatttcacct tcaccttata |
| 601 | cctggagact cccaagccct ccatctccag cagcaactta aaccccaggg aggccatgga |
| 661 | aactgtgatc ttaacctgtg atcctgagac tccggacaca agctaccagt ggtggatgaa |
| 721 | tggtcagagc ctccctatga ctcataggtt tcagctgtcc gaaaccaaca ggaccctctt |
| 781 | tctatttggt gtcacaaagt atactgcagg accctatgaa tgtgaaatac ggaactcagg |
| 841 | gagtgccagc cgcagtgacc cagtcaccct gaatctcctc catggtccag acctccccag |
| 901 | aattcaccct tcatacacca attaccgttc aggagataac ctctacttgt cttgcttcgc |
| 961 | gaactctaac ccaccggcac agtattcttg gacaattaat gggaagtttc agcaatcagg |
| 1021 | acaaaatctg tttatccccc aaattactac aaagcatagc gggctctatg tttgctctgt |
| 1081 | tcgtaactca gccactggcg aggaaagctc cacatcgttg acagtcaaag tctctgcttc |
| 1141 | tacaagaata ggacttcttc ctctccttaa tccaacatag cagctgtgat gtcatttctg |
| 1201 | tatttcagga agactggcag gagatttatg gaaaggtctc ttacaaggac tcttgaatac |
| 1261 | aagctcctga taacttcaag atcataccac tggactaaga actttcaaaa ttttaatgaa |
| 1321 | caggctgata ccttcatgaa attcaagaca aagaagaaaa atactcaatg ttattggact |
| 1381 | aaataatcaa aaggataatg atttcataat tttctatttg aaaatgtgct gattcttgga |
| 1441 | atgtttcatt ctccagattt atgaacattt tttcttgagc aattggtaaa gtatactttt |
| 1501 | gtaaacaaaa attgaaacat ttccttttgc tctctatctg agtgccccag aattgggaat |
| 1561 | ctattcatga gtattcatat gtttatggta ataaagctat ttgcacaagt tc |

[0255] An exemplary human PSG4 amino acid sequence is set forth below (SEQ ID NO: 19; GenBank Accession No: AAH08405.1, Version 1, incorporated herein by reference):

| | |
|---|---|
| 1 | mgtlsappct qrikwkglll tasllnfwnl pttaqvtiea eptkvsegkd vlllvhnlpq |
| 61 | nltgyiwykg qmrdlyhyit syvvdgeiii ygpayggret aysnaslliq nvtredagsy |
| 121 | tlhiikgddg trgvtgrftf tlhletpkps isssnlnpre tmeaysltcd petpdasylw |
| 181 | wmngqslpmt hslklsetnr tlfllgvtky tagpyeceir npvsasrsdp vtlnllpkls |
| 241 | kpyitinnln prenkdvltf tcepksenyt yiwwlngqsl pvsprvkrpi enrililpnv |
| 301 | trnetgpyqc eirdryggir sdpvtlnvly gpdlpsiyps ftyyrsgenl ylscfaesnp |
| 361 | raqyswting kfqlsgqkls ipqittkhsg lyacsvrnsa tgkessksit vkvsdwilp |

[0256] An exemplary human PSG4 nucleic acid sequence is set forth below (SEQ ID NO: 20; GenBank Accession No: M94891.1, Version 1, incorporated herein by reference):

| | |
|---|---|
| 1 | ggacagcaca gctgacagcc gtactcagga agcttctgga tcctaggctt atctccacag |
| 61 | aggagaacac acaagcagca gagaccatgg ggcccctctc agcccctccc tgcacacacc |
| 121 | tcatcacttg gaaggggctc ctgctcacag catcactttt aaacttctgg aatccgccca |
| 181 | caactgccca agtcacgatt gaagcccagc cacccaaagt ttctgagggg aaggatgttc |
| 241 | ttctacttgt ccacaatttg ccccagaatc ttgctggcta catttggtac aaagggcaaa |
| 301 | tgacatacgt ctaccattac attacatcat atgtagtaga cggtcaaaga attatatatg |
| 361 | ggcctgcata cagtggaaga gaaagagtat attccaatgc atccctgctg atccagaatg |
| 421 | tcacgcagga ggatgcagga tcctacacct tacacatcat aaagcgacgc gatgggactg |
| 481 | gaggagtaac tggacatttc accttcacct tacacctgga gactcccaag ccctccatct |
| 541 | ccagcagcaa cttaaatccc agggaggcca tggaggctgt gatcttaacc tgtgatcctg |
| 601 | cgactccagc cgcaagctac cagtggtgga tgaatggtca gagcctccct atgactcaca |
| 661 | ggttgcagct gtccaaaacc aacaggaccc tctttatatt tggtgtcaca aagtatattg |
| 721 | caggacccta tgaatgtgaa atacggaacc cagtgagtgc cagccgcagt gacccagtca |
| 781 | ccctgaatct cctcccaaag ctgtccaagc cctacatcac aatcaacaac ttaaacccca |
| 841 | gagagaataa ggatgtctta accttcacct gtgaacctaa gagtgagaac tacacctaca |
| 901 | tttggtggct aaatggtcag agcctccctg tcagtcccag ggtaaagcga cccattgaaa |
| 961 | acaggatcct cattctaccc aatgtcacga gaaatgaaac aggaccttat caatgtgaaa |
| 1021 | tacgggaccg atatggtggc atccgcagtg acccagtcac cctgaatgtc ctctatggtc |
| 1081 | cagacctccc cagcatttac ccttcattca cctattaccg ttcaggagaa aacctctact |
| 1141 | tgtcctgctt cgccgagtct aacccacggg cacaatattc ttggacaatt aatgggaagt |
| 1201 | ttcagctatc aggacaaaag ctctctatcc cccaaataac tacaaagcat agtgggctct |
| 1261 | atgcttgctc tgttcgtaac tcagccactg gcaaggaaag ctccaaatcc atcacagtca |
| 1321 | aagtctctga ctggatatta ccctgaattc tactagttcc tccaattcca ttttctccca |
| 1381 | tggaatcacg aagagcaaga cccactctgt tccagaagcc ctataagctg gaggtggaca |
| 1441 | actcgatgta aatttcatgg gaaaaccctt gtacctgaca tgtgagccac tcagaactca |
| 1501 | ccaaaatgtt cgacaccata acaacagcta ctcaaactgt aaaccaggat aagaagttga |
| 1561 | tgacttcaca ctgtggacag tttttccaaa gatgtcagaa caagactccc catcatgata |
| 1621 | aggctcccac ccctcttaac tgtccttgct catgcctgcc tctttcactt ggcaggataa |
| 1681 | tgcagtcatt agaatttcac atgtagtagc ttctgagggt aacaacagag tgtcagatat |
| 1741 | gtcatctcaa cctcaaactt ttacgtaaca tctcagggga aatgtggctc tctccatctt |
| 1801 | gcatacaggg ctcccaatag aaatgaacac agagatattg cctgtgtgtt tgcagagaag |
| 1861 | atggtttcta taaagagtag gaaagctgaa attatagtag agtctccttt aaatgcacat |
| 1921 | tgtgtggatg gctctcacca tttcctaaga gatacagtgt aaaacgtgac agtaatactg |
| 1981 | attctagcag aataaaacat gtaccacatt tgctaaaaaa aaaaaaaaaa aaaaaaaaaa |
| 2041 | aaa |

[0257] An exemplary human PSG5 amino acid sequence is set forth below (SEQ ID NO: 21; GenBank Accession No: AAH12607.1, Version 1, incorporated herein by reference):

| | |
|---|---|
| 1 | mgplsappct qhitwkgvll tasllnfwnl pitaqvtiea lppkvsegkd vlllvhnlpq |
| 61 | nlagyiwykg qlmdlyhyit syvvdgqini ygpaytgret vysnaslliq nvtredagsy |
| 121 | tlhiikrgdr trgvtgyftf nlylklpkpy itinnskpre nkdvlaftce pksenytyiw |
| 181 | wlngqslpvs prvkqpienr ililpsvtrn etgpyeceir drdggmhsdp vtlnvlygpd |
| 241 | lpsiypsfty yrsgenlyls cfaesnppae yfwtingkfq qsgqklsipq ittkhrglyt |
| 301 | csvrnsatgk essksmtvev sapsgigrlp llnpi |

[0258] An exemplary human PSG5 nucleic acid sequence is set forth below (SEQ ID NO: 22; GenBank Accession No: BC012607.1, Version 1, incorporated herein by reference):

| | |
|---|---|
| 1 | ggggaaggag gaaggacagc acagcctaca gccgtgctca ggaagtttct ggatcctagg |
| 61 | ctcagctcca cagaggagaa cacgcaggcg cagagaccat ggggcccctc tcagcccctc |
| 121 | cctgcacaca gcacatcacc tggaaggggg tcctgctcac agcatcactt ttaaacttct |
| 181 | ggaacctgcc tatcactgct caagtcacga ttgaagccct gccacccaaa gtttccgagg |
| 241 | ggaaggatgt tcttctactt gtccacaatt tgcctcagaa tcttgctggc tacatctggt |
| 301 | acaaaggaca actgatggac ctctaccatt acattacatc atatgtagta gacggtcaaa |
| 361 | taaatatata tgggcctgca tacactggac gagaaacagt atattccaat gcatccctgc |
| 421 | tgatccagaa tgtcacccgg gaagacgcag gatcctatac cttacacatc ataaagcgag |
| 481 | gtgataggac tagaggagta actggatatt tcaccttcaa cttatacctg aagctgccca |
| 541 | agccctacat caccatcaac aactcaaaac ccagggagaa taaggatgtc ttagccttca |
| 601 | cctgtgaacc taagagtgag aactacacct acatttggtg gctaaatggt cagagcctcc |
| 661 | cggtcagtcc cagggtaaag caacccattg aaaacaggat cctcattcta cccagtgtca |
| 721 | cgagaaatga aacaggaccc tatgaatgtg aaatacggga ccgagatggt ggcatgcaca |
| 781 | gtgacccagt caccctgaat gtcctctatg gtccagacct ccccagcatt tacccttcat |
| 841 | tcacctatta ccgttcagga gaaaacctct acttgtcctg cttcgcggaa tctaacccac |
| 901 | cggcagagta tttttggaca attaatggga agtttcagca atcaggacaa aagctctcta |
| 961 | tcccccaaat tactacaaag catagagggc tctatacttg ctctgttcgt aactcagcca |
| 1021 | ctggcaagga aagctccaaa tccatgacag tcgaagtctc tgctccttca ggaataggac |
| 1081 | gtcttcctct ccttaatcca atatagcagc cgtgaagtca tttctgtatt tcaggaagac |
| 1141 | tggcagacag ttgctttgat tcttcctcaa actacttaca atcacctaca gtccaaaatt |
| 1201 | gctttttctt caaggagatt tatggaaaag actctgacaa ggactcttga atacaagttc |
| 1261 | ctgataactt caagatcata ccactggact aagaactttc aaaattttaa tgaacaggct |
| 1321 | gataccttca tgaaattcta gacaaagaag aaaaaaactc catgttattg gactaaataa |
| 1381 | tcaaaagcat aatgttttca taattttcta tttgaaaatg tgctgattct ttgaatgttt |
| 1441 | tattctccag atttatgaac tttttttctt gagcaattgg taaagtatac ttttgtaaac |
| 1501 | aaaaattgaa acatttgctt ttactctcta tctgagtgcc ccagaattgg gaaactattc |
| 1561 | atgagtattc atatgtttat ggtaataaag ttatctgcac aagttcaaaa aaaaaaaaaa |
| 1621 | aaaaaaaaaa aaaaaa |

[0259] An exemplary human PSG6 amino acid sequence is set forth below (SEQ ID NO: 23; GenBank Accession No: AAC25619.1, Version 1, incorporated herein by reference):

| | |
|---|---|
| 1 | mgplsappct qhitwkglll tasllnfwnl pttaqviiea kppkvsegkd vlllvhnlpq |
| 61 | nltgyiwykg qmtdlyhyit syvvhgqiiy gpaysgretv ysnaslliqn vtqedagsyt |
| 121 | lhiikrgdgt ggvtgyftvt lysetpkpsi sssnlnprev meavrlicdp etpdasylwl |
| 181 | lngqnlpmth rlqlsktnrt lylfgvtkyi agpyeceirn pvsasrsdpv tlnllpklpm |
| 241 | pyitinnlnp rekkdvlaft cepksrnyty iwwlngqslp vsprvkrpie nrililpsvt |
| 301 | rnetgpyqce irdryggirs npvtlnvlyg pdlpriypsf tyyrsgenld lscfadsnpp |
| 361 | aeyswtingk fqlsgqklfi pqittnhsgl yacsvrnsat gkeisksmiv kvsetaspqv |
| 421 | tyagpntwfq eilll |

[0260] An exemplary human PSG6 nucleic acid sequence is set forth below (SEQ ID NO: 24; GenBank Accession No: M33666.1, Version 1, incorporated herein by reference):

| | |
|---|---|
| 1 | gggcgggcct aggctcatct ccacagggga gaacacacag acagcagaga ccatgggacc |
| 61 | cctctcagcc cctccctgca ctcagcacat cacctggaag gggctcctgc tcacagcatc |
| 121 | acttttaaac ttctggaacc tgcccaccac tgcccaagta ataattgaag ccaagccacc |
| 181 | caaagtttcc gaggggaagg atgttcttct acttgtccac aatttgcccc agaatcttac |
| 241 | tggctacatc tggtacaaag ggcaaatgac ggacctctac cattacatta catcatatgt |
| 301 | agtacacggt caaattatat atgggcctgc ctacagtgga cgagaaacag tatattccaa |
| 361 | tgcatccctg ctgatccaga atgtcacaca ggaggatgca ggatcctaca ccttacacat |
| 421 | cataaagcga ggcgatggga ctggaggagt aactggatat ttcactgtca ccttatactc |
| 481 | ggagactccc aagccctcca tctccagcag caacttaaac cccagggagg tcatggaggc |
| 541 | tgtgcgctta atctgtgatc ctgagactcc ggatgcaagc tacctgtggt tgctgaatgg |
| 601 | tcagaacctc cctatgactc acaggttgca gctgtccaaa accaacagga ccctctatct |
| 661 | atttggtgtc acaaagtata ttgcaggacc ctatgaatgt gaaatacgga acccagtgag |
| 721 | tgccagccgc agtgacccag tcaccctgaa tctcctcccg aagctgccca tgccttacat |
| 781 | caccatcaac aacttaaacc ccagggagaa gaaggatgtg ttagccttca cctgtgaacc |
| 841 | taagagtcgg aactacacct acatttggtg gctaaatggt cagagcctcc cggtcagtcc |
| 901 | gagggtaaag cgacccattg aaaacaggat actcattcta cccagtgtca cgagaaatga |
| 961 | aacaggaccc tatcaatgtg aaatacggga ccgatatggt ggcatccgca gtaacccagt |
| 1021 | caccctgaat gtcctctatg gtccagacct ccccagaatt tacccttcat tcacctatta |
| 1081 | ccgttcagga gaaaacctcg acttgtcctg ctttgcggac tctaacccac cggcagagta |
| 1141 | ttcttggaca attaatggga agtttcagct atcaggacaa aagctcttta tcccccaaat |
| 1201 | tactacaaat catagcgggc tctatgcttg ctctgttcgt aactcagcca ctggcaagga |
| 1261 | aatctccaaa tccatgatag tcaaagtctc tgagacagca tctccccagg ttacctatgc |
| 1321 | tggtccaaac acctggtttc aagaaatcct tctgctgtga cctcccaaag tgctaggatt |
| 1381 | aaaacatgac ccaccatgaa acccgccca |

[0261] An exemplary human GABRA3 amino acid sequence is set forth below (SEQ ID NO: 25; GenBank Accession No: AAG12455.1, Version 1, incorporated herein by reference):

| | |
|---|---|
| 1 | miitqtshcy mtslgilfli nilpgttgqg esrrqepgdf vkqdigglsp khapdipdds |
| 61 | tdnitiftri ldrlldgydn rlrpglgdav tevktdiyvt sfgpvsdtdm eytidvffrq |
| 121 | twhderlkfd gpmkilplnn llaskiwtpd tffhngkksv ahnmttpnkl lrlvdngtll |
| 181 | ytmrltihae cpmhledfpm dvhacplkfg syayttaevv yswtlgknks vevaqdgsrl |
| 241 | nqydllghvv gteiirsstg eyvvmtthfh lkrkigyfvi qtylpcimtv ilsqvsfwln |
| 301 | resvpartvf gvttvltmtt lsisarnslp kvayatamdw fiavcyafvf saliefatvn |
| 361 | yftkrswawe gkkvpealem kkktpaapak ktsttfnivg ttypinlakd tefstiskga |
| 421 | apsasstpti iaspkatyvq dsptetktyn syskvdkisr iifpvlfaif nlvywatyvn |
| 481 | resaikgmir kg |

[0262] An exemplary human GABRA3 nucleic acid sequence is set forth below (SEQ ID NO: 26; GenBank Accession No: NM_000808.3, Version 3, incorporated herein by reference):

| | |
|---|---|
| 1 | gagagagaga gagagagaga gagagagaga gagcgagaga gcgtgagcgc gcgcaagcta |
| 61 | gcgagcaaac cagagagaca gaccgagaga gggaccagga gagagaccca gagagagaag |
| 121 | aagaagccag aagccgagct ctgtcagggc tcaacctcca acttgtttca gttcattcat |
| 181 | ccttctctcc tttccgctca gactgtagag ctcggtctct ccaagtttgt gcctaagaag |
| 241 | atgataatca cacaaacaag tcactgttac atgaccagcc ttgggattct tttcctgatt |
| 301 | aatattctcc ctggaaccac tggtcaaggg gaatcaagac gacaagaacc cggggacttt |
| 361 | gtgaagcagg acattggcgg gctgtctcct aagcatgccc cagatattcc tgatgacagc |
| 421 | actgacaaca tcactatctt caccagaatc ttggatcgtc ttctggacgg ctatgacaac |
| 481 | cggctgcgac ctgggcttgg agatgcagtg actgaagtga agactgacat ctacgtgacc |
| 541 | agttttggcc ctgtgtcaga cactgacatg gagtacacta ttgatgtatt ttttcggcag |
| 601 | acatggcatg atgaaagact gaaatttgat ggccccatga agatccttcc actgaacaat |
| 661 | ctcctggcta gtaagatctg gacaccggac accttcttcc acaatggcaa gaaatcagtg |
| 721 | gctcataaca tgaccacgcc caacaagctg ctcagattgg tggacaacgg aaccctcctc |
| 781 | tatacaatga ggttaacaat tcatgctgag tgtcccatgc atttggaaga ttttcccatg |
| 841 | gatgtgcatg cctgcccact gaagtttgga agctatgcct atacaacagc tgaagtggtt |
| 901 | tattcttgga ctctcggaaa gaacaaatcc gtggaagtgg cacaggatgg ttctcgcttg |
| 961 | aaccagtatg accttttggg ccatgttgtt gggacagaga taatccggtc tagtacagga |
| 1021 | gaatatgtcg tcatgacaac ccacttccat ctcaagcgaa aaattggcta ctttgtgatc |
| 1081 | cagacctact tgccatgtat catgactgtc attctgtcac aagtgtcgtt ctggctcaac |
| 1141 | agagagtctg ttcctgcccg tacagtcttt ggtgtcacca ctgtgcttac catgaccacc |
| 1201 | ttgagtatca gtgccagaaa ttccttacct aaagtggcat atgcgacggc catggactgg |
| 1261 | ttcatagccg tctgttatgc ctttgtattt tctgcactga ttgaatttgc cactgtcaac |
| 1321 | tatttcacca agcggagttg ggcttgggaa ggcaagaagg tgccagaggc cctggagatg |
| 1381 | aagaagaaaa caccagcagc cccagcaaag aaaaccagca ctaccttcaa catcgtgggg |
| 1441 | accacctatc ccatcaacct ggccaaggac actgaatttt ccaccatctc caagggcgct |
| 1501 | gctcccagtg cctcctcaac cccaacaatc attgcttcac ccaaggccac ctacgtgcag |
| 1561 | gacagcccga ctgagaccaa gacctacaac agtgtcagca aggttgacaa aatttcccgc |
| 1621 | atcatctttc ctgtgctctt tgccatattc aatctggtct attgggccac atatgtcaac |
| 1681 | cgggagtcag ctatcaaggg catgatccgc aaacagtaga tagtggtggc agtgcagcaa |
| 1741 | ccagagcact gtataccccg tgaagcatcc aggcacccaa accccggggc tccccttcgc |
| 1801 | gtatttcagg attctccttt ttacccctct accaagctgt gaccctcaat tcatatttat |
| 1861 | gaatctctac gcaaaaaata actacagaaa aattacttgt ccctccaata ttgcccagta |
| 1921 | taaccccatc aaagccaaac actgccattt gtccagttgc tcatcttagt ctgccaatct |
| 1981 | cccctagctg agggcactgc atgtatttta ttgcactctg cccgctgcaa aaagaacaag |
| 2041 | agattctact ctccatagtg gaagccttgg ctgtttgaga ggcccagaac aaggagaatt |
| 2101 | gttgactccc atctagatca gatgactcta acttactagg cagccaggtt aggctaggcc |
| 2161 | atgtgatcct gcgtgccacc tcccctgcct tcagcaaggc ctactaggca taagtactga |
| 2221 | tagcaaaggt gggagccagt tctacacccc caacccattt attggtttgg aaattagtgg |
| 2281 | ggacaattgg tactaaccac cgtctaccat gtatggccaa aataaataga actagctctg |
| 2341 | ccagcctggc accaagatgg ctggtgccct gccatgtcca gcccctcggg aaaatagtcc |
| 2401 | cctccttggt acatctctcc tccagaaaat cttcttcccc cactgccttt ggcacccttg |
| 2461 | tagccaactg agcactactt aatttggact cattaccacc tgtaaacttt tcaggaaaaa |
| 2521 | atgatcaagc attttttatt tatatcgaaa agttgcaaat agaaacaaag tgatctagat |
| 2581 | ttaaaaaaaa cattttttta aaatatggga gagatacaaa agtcacctcc ctgccaaggc |
| 2641 | aactagccta tactggattg ggtaagaggt ttggagtgga tggtagttga ggattgaagt |
| 2701 | ctggctcaaa agagaaggct actggcagat gaaagtcaaa ttcttccttc catacactcc |
| 2761 | acattccaca ccctggccca ggcac |

[0263] An exemplary human GABRB1 amino acid sequence is set forth below (SEQ ID NO: 27; GenBank Accession No: AAH22449.1, Version 1, incorporated herein by reference):

| | |
|---|---|
| 1 | mwtvqnresl gllsfpvmit mvccahstne psnmsyvket vdrllkgydi rlrpdfggpp |
| 61 | vdvgmridva sidmvsevnm dytltmyfqq swkdkrlsys giplnltldn rvadqlcvpd |
| 121 | tyflndkksf vhgvtvknrm irlhpdgtvl yglritttaa cmmdlrrypl deqnctleie |
| 181 | sygyttddie fywnggegav tgvnkielpq fsivdykmvs kkvefttgay prlslsfrlk |
| 241 | rnigyfilqt ympstlitil swvsfwinyd asaarvalgi ttvltmttis thlretlpki |
| 301 | pyvkaidiyl mgcfvfvfla lleyafvnyi ffgkgpqkkg askqdqsane knklemnkvq |
| 361 | vdahgnills tleirnetsg sevltsysdp katmysydsa siqyrkplss reaygraldr |
| 421 | hgvpskgrnr rrasqlkvki pdltdvnsid kwsrmffpit fslfnvvywl yyvh |

[0264] An exemplary human GABRB1 nucleic acid sequence is set forth below (SEQ ID NO: 28; GenBank Accession No: NM_000812.3, Version 3, incorporated herein by reference):

| | |
|---|---|
| 1 | agccttagcc agatcactga gcgcccagta aaaaaaacaa aatcaggttg agggcagaaa |
| 61 | tgaaatcaac atagcaacct ccaatgcatg aaggaaactc cgtttacaca tgctcgtagg |
| 121 | atcccctgcg tggaaacagc agcttgtctc tgactacccg gaggacatgg agcaccccaa |
| 181 | ataggaactt tagagggatt gaaatctgtt gcctgttcca ctaggaatat tgtttgcaag |
| 241 | gcacaaggtg tcttttggta gtgagcgcgc tctgcgcatg cgcaggtcca ttcgggaatt |
| 301 | actgcccagc agccgactaa gttgcattcc ttgaatcttc gcagaaaaga caattctttt |
| 361 | aatcagagtt agtaatgtgg acagtacaaa atcgagagag tctggggctt ctctctttcc |
| 421 | ctgtgatgat taccatggtc tgttgtgcac acagcaccaa tgaacccagc aacatgtcat |
| 481 | acgtgaaaga gacagtggac agattgctca aaggatatga cattcgcttg cggccggact |
| 541 | tcggagggcc ccccgtcgac gttgggatgc ggatcgatgt cgccagcata gacatggtct |
| 601 | ccgaagtgaa tatggattat acactcacca tgtatttcca gcagtcttgg aaagacaaaa |
| 661 | ggctttctta ttctggaatc ccactgaacc tcaccctaga caatagggta gctgaccaac |
| 721 | tctgggtacc agacacctac tttctgaatg acaagaaatc atttgtgcat ggggtcacag |
| 781 | tgaaaaatcg aatgattcga ctgcatcctg atggaacagt tctctatgga ctccgaatca |
| 841 | caaccacagc tgcatgtatg atggatcttc gaagatatcc actggatgag cagaactgca |
| 901 | ccctggagat cgaaagttat ggctatacca ctgatgacat tgaattttac tggaatggag |
| 961 | gagaaggggc agtcactggt gttaataaaa tcgaacttcc tcaattttca attgttgact |
| 1021 | acaagatggt gtctaagaag gtggagttca caacaggagc gtatccacga ctgtcactaa |
| 1081 | gttttcgtct aaagagaaac attggttact tcattttgca aacctacatg ccttctacac |
| 1141 | tgattacaat tctgtcctgg gtgtcttttt ggatcaacta tgatgcatct gcagccagag |
| 1201 | tcgcactagg aatcacgaca gtgcttacaa tgacaaccat cagcacccac ctcagggaga |
| 1261 | ccctgccaaa gatcccttat gtcaaagcga ttgatattta tctgatgggt tgctttgtgt |
| 1321 | ttgtgttcct ggctctgctg gagtatgcct ttgtaaatta catcttcttt gggaaaggcc |
| 1381 | ctcagaaaaa gggagctagc aaacaagacc agagtgccaa tgagaagaat aaactggaga |
| 1441 | tgaataaagt ccaggtcgac gcccacggta acattctcct cagcaccctg gaaatccgga |
| 1501 | atgagacgag tggctcggaa gtgctcacga gcgtgagcga ccccaaggcc accatgtact |
| 1561 | cctatgacag cgccagcatc cagtaccgca agcccctgag cagccgcgag gcctacgggc |
| 1621 | gcgccctgga ccggcacggg gtacccagca aggggcgcat ccgcaggcgt gcctcccagc |
| 1681 | tcaaagtcaa gatccccgac ttgactgatg tgaattccat agacaagtgg tcccgaatgt |
| 1741 | ttttccccat caccttttct ctttttaatg tcgtctattg gctttactat gtacactgag |
| 1801 | gtctgttcta atggttccat ttagactact ttcctcttct attgtttttt aaccttacag |
| 1861 | gtccccaaca gcgatactgc tgtttctcga ggtaagagat tcagccatcc aattggtttt |
| 1921 | aggtcttgca tatcagtttt attactgcac catgtttact tcaaaaagac aaaacaaaaa |
| 1981 | aaaaattatt tttccagtct accgtggtcc aggttatcag ctctttaaga gctctattaa |
| 2041 | ttgccatgtt tacaaacaaa cacaaagaga gaagttagac aggtagatct ttagcagtct |
| 2101 | tttctagttt ccctggattt cactgattta ttttttaggg aaaatgaaaa gaggaccttg |
| 2161 | ctgtccgcct gcactgcttc ctggtaaact ataacaaact tatgctgcca aaaaaaaaaa |
| 2221 | aaaaaa |

[0265] An exemplary human GABRB2 amino acid sequence is set forth below (SEQ ID NO: 29; GenBank Accession No: AAI05640.1, Version 1, incorporated herein by reference):

| | |
|---|---|
| 1 | mwrvrkrgyf giwsfpliia avcaqsvndp snmslvketv drllkgydir lrpdfggppv |
| 61 | avgmnidias idmvsevnmd ytltmyfqqa wrdkrlsynv iplnltldnr vadqlwvpdt |
| 121 | yflndkksfv hgvtvknrmi rlhpdgtvly glritttaac mmdlrrypld eqnctleies |
| 181 | ygyttddief ywrgddnavt gvtkielpqf sivdyklitk kvvfstgsyp rlslsfklkr |
| 241 | nigyfilqty mpsilitils wvsfwinyda saarvalgit tvltmttint hlretlpkip |
| 301 | yvkaidmylm gcfvfvfmal leyalvnyif fgrgpqrqkk aaekaasann ekmrldvnkm |
| 361 | dphenillst leiknemats eavmglgdpr stmlaydass iqyrkaglpr hsfgrnaler |
| 421 | hvaqkksrlr rrasqlkiti pdltdvnaid rwsriffpvv fsffnivywl yyvn |

[0266] An exemplary human GABRB2 nucleic acid sequence is set forth below (SEQ ID NO: 30; GenBank Accession No: NM_021911.2, Version 2, incorporated herein by reference):

| | |
|---|---|
| 1 | gcgcggggaa gggaagaaga ggacgaggtg gcgcggagac cgcgggagaa cacagtgcct |
| 61 | ccggaggaaa tctgctcggt ccccggcagc cgccgcttcc cctttgatgt tttggtacgc |
| 121 | cgtgcgcatg cgcctcacat tagaattact gcactgggca gactaagttg gatctcctct |
| 181 | cttcagtgaa accctcaatt ccatcaaaaa ctaaagggat gtggagagtg cggaaaaggg |
| 241 | gctactttgg gatttggtcc ttccccttaa taatcgccgc tgtctgtgcg cagagtgtca |
| 301 | atgaccctag taatatgtcg ctggttaaag agacggtgga tagactcctg aaaggctatg |
| 361 | acattcgtct gagaccagat tttggaggtc cccccgtggc tgtggggatg aacattgaca |
| 421 | ttgccagcat cgatatggtt tctgaagtca atatggatta taccttgaca atgtactttc |
| 481 | aacaagcctg gagagataag aggctgtcct ataatgtaat acctttaaac ttgactctgg |
| 541 | acaacagagt ggcagaccag ctctgggtgc ctgataccta tttcctgaac gataagaagt |
| 601 | catttgtgca cggagtgact gttaagaacc gcatgattcg cctgcatcct gatggcaccg |
| 661 | tcctttatgg actcagaatc acaaccacag ctgcctgcat gatggaccta aggaggtacc |
| 721 | cactggatga acaaaactgc accttggaaa ttgagagcta tggatacaca actgatgaca |
| 781 | ttgagtttta ctggcgtggc gatgataatg cagtaacagg agtaacgaaa attgaacttc |
| 841 | cacagttctc tattgtagat tacaaactta tcaccaagaa ggttgttttt tccacaggtt |
| 901 | cctatcccag gttatccctc agctttaagc ttaagagaaa cattggctac tttatcctgc |
| 961 | aaacatacat gccttccatc ctgattacca tcctctcctg ggtctccttc tggattaatt |
| 1021 | acgatgcttc agctgcaagg gtggcattag gaatcacaac tgtcctcaca atgaccacaa |
| 1081 | tcaacaccca cctccgggaa actctcccta aaatccccta tgtgaaggcc attgacatgt |
| 1141 | acctgatggg gtgctttgtc ttcgttttca tggcccttct ggaatatgcc ctagtcaact |
| 1201 | acatcttctt tgggaggggg ccccaacgcc aaaagaaagc agctgagaag gctgccagtg |
| 1261 | ccaacaatga gaagatgcgc ctggatgtca acaagatttt ttataaagat attaaacaaa |
| 1321 | atgggaccca atatcgatcc ttgtgggacc ctactggaaa cctctcccca actagacgga |
| 1381 | ctaccaatta cgatttctct ctgtatacga tggaccccca tgagaacatc ttactgagca |
| 1441 | ctctcgagat aaaaaatgaa atggccacat ctgaggctgt gatgggactt ggagacccca |
| 1501 | gaagcacaat gctagcctat gatgcctcca gcatccagta tcggaaagct gggttgccca |
| 1561 | ggcatagttt tggccgaaat gctctggaac gacatgtggc gcaaaagaaa agtcgcctga |
| 1621 | ggagacgcgc ctcccaactg aaaatcacca tccctgactt gactgatgtg aatgccatag |
| 1681 | atcggtggtc ccgcatattc ttcccagtgg ttttttcctt cttcaacatc gtctattggc |
| 1741 | tttattatgt gaactaaaac atggcctccc actggaagca aggactagat tcctcctcaa |
| 1801 | accagttgta cagcctgatg taggacttgg aaaacacatc aatccaggac aaaagtgacg |
| 1861 | ctaaaatacc ttagttgctg gcctatcctg tggtccattt cataccattt gggttgcttc |
| 1921 | tgctaagtaa tgaatacact aaggtccttg tggttttcca gttaaaacgc aagtgatttt |
| 1981 | tacacatggt ggctagacag cctgagtgct ccatgttgtc tgtttagtat gcagcctact |
| 2041 | cagaggggaa taatttggaa gatattctta gaaggctcaa cagcattgtc agtcatttgg |
| 2101 | tcataaccag atactcctca tcttcctttt taaggtcggc atgctgttga gatggcattg |
| 2161 | tccttatgaa acattatctg taatgccatg caaacacatt acttgaagat gatctatgat |
| 2221 | tttcttactg agatgataat ggtgtcatgg gaagattatt cccactggtt tctaaaagat |
| 2281 | tctcttgtga tttgagcagg ctaggggaat caagacagag actcaggaaa ccgatttggc |
| 2341 | cagtcccttt gcttgagcac ggagaatcaa ctatgatgtc tttcattttg gcatttagag |
| 2401 | atgaggagac ttctggacaa tatcatgcat ggtggccaag aaaatttttg ctaaacggct |
| 2461 | atttcctagg tggttaaagt aagagttaac aacacagagc agagtagaaa atcagaaacg |
| 2521 | acggttgtaa caaaaagcaa gcaagcaaga aagcatgacc cttatcagct ccacacagca |
| 2581 | tctggtctat acatactgtg tctagtggca gagggtgagt aagagagatt gtttttccaa |
| 2641 | catcactagc ttttgacagc atacctaaag aggtttttat agtttaatcg aagataacca |
| 2701 | tgaaatacaa aaattagaga aatgagaatt gtcttagata ttcaggttag attcagagtc |
| 2761 | attcaaatat acaaatacag agcacaaact agcaaacaga ttgtttttct cagacgaagt |
| 2821 | cagctgtccc tgcaattttt gtccctataa ttttatttct taatttaata gagtatttca |
| 2881 | agagaaggat ttgttcatca ctttaaagga ttcatggtcc tctccagctt tttttttgct |
| 2941 | tccaaaattc tgattatatt cttaggagac tggcaaagta aggctttgga gagattgagt |
| 3001 | gaactatatt ttcttatatg caatgaaatt caccattgta tttttcaaag caaataatac |
| 3061 | ttcaaggagt atgaacacac agagagttaa tttgtgcatt cattggtttg gggcttgatt |
| 3121 | ttcttaagag tgctttcatt gtatatgttg caatctgcct aatcaaggaa aatatgaaaa |
| 3181 | ctagtggaaa ataataacaa agccacatta acatgataaa tgttatgagc ctcagttgat |
| 3241 | attgcagaaa aatatataac tgttaatcag gcaggcatga tgtatttttt ttctattttt |
| 3301 | aagttatgcc attgtgcttc tttctacact aattggacat aagcattcat atgttggaca |
| 3361 | agaggagaat aagctaatat gtcttccttc tatcaatata aggctcatat tttgcttttc |
| 3421 | ttatagaaaa tagtgaattg ctaaattttc cttaaagttg aatttgattg aactttttct |
| 3481 | tggaggatga ctttgctatt tctattttga aaacaaagaa agctcttctt tttagagtaa |
| 3541 | tatccctaat tgtgcatagc agccagtatc cacctgtgaa taatgtatgt tttcttgatt |
| 3601 | ccttgtttcc ttcatgattt agcagcttgg aatatgatgg agtactattg cccttgcatt |
| 3661 | ccagctgtcc aagaacaaca acaaaccttt atccttcagc tttctgaatt tgccccaaaa |
| 3721 | tggaatggta ttttgttttt caccagtgta ggaaaccttg gccattatat tttgattaca |
| 3781 | taatcttgag cacctctgag tatcatcttt gggcagaatc tgaccaagat tcttctcaca |
| 3841 | ggctcagagt agagattcct catgtttctc caggacacac tttctcctag gcaatcattt |
| 3901 | tggggcatca cactaagtaa agtgcctgcc ccttgtcaac agggggtaaa gtttgactaa |
| 3961 | aaaacatcag gaaggaacat attgataact caggggcaca actccaaaat gccattctga |
| 4021 | aaaggctctt ctagagtcaa ctcagagccc aagtgtagaa gtgggctctt atgtgcaatc |
| 4081 | actgtacaag ccataaaaat ctttgatatt gccatttatg attacaacaa aattttagat |
| 4141 | gtccaagaaa gtcaacagaa caatccagat caaagtgtag agaagcatct ttgcagcttg |
| 4201 | agcctcaaaa gcataaaacc aggaattcat ttctgctctc agtgatacaa gaaacaaggc |
| 4261 | aaaggaaaaa agatgggacc ttagaagcaa tgccctagag taaaaagcat acattggcac |
| 4321 | tcagtaacca cagagataga aacaactgac tcagcctctc cagaaataac agtagatgta |
| 4381 | gaatttgttc ttaaatatat gtttcgttga aatgaaatgc agtcatcaaa tgcgaggagg |
| 4441 | ggtgctagac ctgataagtc taggaagacc agtcagcttg atagccagtt gttaaactaa |
| 4501 | aggaccacaa aggtgtgttt agtagttctg atatgggatt actatcagtt tatacatatg |
| 4561 | tatagatttt cttttaatta taaacagcca gatagccagc aattaaggtg ttttttcatc |
| 4621 | tttgtgaaat tcatggacaa attctgactc taaaatgcac agtctacatg aaatctttga |
| 4681 | tctcaatctg tatatatata tattgtacat gaccgctagt aggtatgaaa tgcatttcag |
| 4741 | agttgaaaac tcatgcaaca taatcatgtg tttgcataag gaatgttaaa attctttcta |
| 4801 | ctacaattta ttaacagggg aaaagattca agcagtgcca tctagacctt ttctcttctc |
| 4861 | atttcttcaa aagcagtgct aagtaaaata ataataataa aaatggttta tgaaccaaaa |
| 4921 | gactttacat tctagcatta ggaacacaca caaaaaaatc tgtcagctta caaaagcaca |
| 4981 | acacataaag aaagagcagt ggaatgcgta atggggaaat gaatcatgtt taaagcaaga |
| 5041 | cttgcattaa attggcaact aagataattt ccattttcta taggtaaccg tgttccagtt |
| 5101 | taatgattac cttcatactc aacaagaaaa atggcaaagc aacatcatca aaataggtct |
| 5161 | tacaacatat ctacatgtat atatgtgtat atatagattc atataaacat acatacatat |
| 5221 | atatgcattc atatgttgga aaacaaaagg aataagctaa tatgttttat ttccttcatt |
| 5281 | aaaccagtat atgagtattt ttaatttggc aaacaaaaat caacatactg aaataagtaa |
| 5341 | tacagggtac tgagcatttc tctatcagca aatcaatgcc tacagttttt atgaaccatt |
| 5401 | gcacagttca actcgacaat agtactgtac cccagaacat cagaagttaa gtagttgtca |
| 5461 | cattgcttgt ctaattgctc tctttttcaa ggaaacaaat aacattgtcc attggtgagt |
| 5521 | caaaaacaaa catgtcttaa gaaaatgaaa aatgataaaa attcctccaa agaggaagaa |
| 5581 | aaaaaaaaaa ctaaacccca ccatgttggt tagggcaaaa tactaagtat tcacaactgt |
| 5641 | agcaatcatg ccatttggct aaatgtacag agtacatgta atgtgagcaa ccataacttt |
| 5701 | cactgaacgt gtgtaaatat taaaacagat ttcttaaata tttttaactt ctaatttgta |
| 5761 | ttttatggta aggcaatgtg ctaattccgt ttatggctta agttgatgtg ttataatatg |
| 5821 | taaataatta aacatgctgt aaatgaatag tcaatagata caaataattg tttagttttt |
| 5881 | ttcttaattt ttatttattt tttactaagt actattactg cagtgccccc agcagagtaa |
| 5941 | tttaaacacc cttttgcata aatggtttgg gaatcccaga cagaagggtt tcaatttgct |
| 6001 | atcacacaca cagtcacaca cagtcacaca cacacacaca cacacactca aacacacata |
| 6061 | atcttttgct cacccactct gtctctctgc ccgtctatgg gaaacactct actatttatg |
| 6121 | tagtcaatat aacaaacaag agatagcctt tgaaatggca attgggaaaa gcaaaaatga |
| 6181 | tcattgataa cttaatagac ttttttatat gtcagagttc aagaaaccaa agtttgcaac |
| 6241 | ttaaatctca gttttcaaac agtaaaagtt tgtatagatg gcactacaga aaaataaaaa |
| 6301 | tggttattcc taccagctcc agaaatgtgt tacacaatat acactagaag actttttttt |
| 6361 | taataatagt attttgtcct taggtagtat tgttcctttc aaccaaagac tccagaatta |
| 6421 | ttgaaaaaca aaaaaggaaa aaaaaaatga gataatgggg gaaaaaaagg acgctgcttc |
| 6481 | acaccaaagg tttaaaaaaa tattttccaa atgcactagg aacattgtaa aaaccagaaa |
| 6541 | ggagtgaaca gaatgctaat gaagatactg ccctaaagaa atctgtacaa aaaaaaaaaa |
| 6601 | aaaaagcagc actcttaaaa agctactagg tttttggaaa ttgaagtaaa atatttctgt |
| 6661 | agatatattc aaaattctga catcaaattt taatttgctt aaagaagttt tatttgtgat |
| 6721 | gaagatcaat atgattcaaa tgatgaaaaa caaaactgta tgtcctttga gttcccaaac |
| 6781 | caaatgtcac tgccgtgtca catcctctaa tctgatgccc atgtgtgtgt ccttgcgcca |
| 6841 | tttgaagcaa gttgacagtt ccatcagttt gtttttgttt ttgtttttgg ttcaataatt |
| 6901 | tgagttcaac catcgtcatt ttaaacataa ttaatcccaa caaagttgcc tatagtttaa |
| 6961 | tttaaacctc acagcatttt taatttattt tgcatgggtg tttaaatagt tctgttacga |
| 7021 | atattgtccc tgcacagttc taaattgtcc ttttataaaa aaaaaaagtg atattctagt |
| 7081 | ttcttcacaa tgtagtgatt atcagcctta ctaattacct tgtagccttt cttaatatgc |
| 7141 | acataatgca cattttccga tggctagaaa aatgcaaaac acagtggata tcattgcatc |
| 7201 | tattttcatg tctttctaaa aacaggacta ttaaaatctc tgggatacat gagatagtaa |
| 7261 | aaaatgagga ttataaatga atagcacata agaattattt tcttgaattt aaacttattg |
| 7321 | cagccagttt cagcatgtaa atatataata atgttggcta gtgtgtaatt cttgaactaa |
| 7381 | gaaatataaa taaaaataaa aagattgtg |

[0267] An exemplary human GABRG2 amino acid sequence is set forth below (SEQ ID NO: 31; GenBank Accession No: AAD50273.1, Version 1, incorporated herein by reference):

| | |
|---|---|
| 1 | msspniwstg ssvystpvfs qkmtvwilll lslypgftsq ksdddyedya snktwvltpk |
| 61 | vpegdvtvil nnllegydnk lrpdigvkpt lihtdmyvns igpvnainme ytidiffaqt |
| 121 | wydrrlkfns tikvlrinsn mvgkiwipdt ffrnskkada hwittpnrml riwndgrvly |
| 181 | tlrltidaec qlqlhnfpmd ehscplefss ygypreeivy qwkrssvevg dtrswrlyqf |
| 241 | sfvglrntte vvkttsgdyv vmsvyfdlsr rmgyftiqty ipctlivvls wvsfwinkda |
| 301 | vpartslgit tvltmttlst iarkslpkvs yvtamdlfvs vcfifvfsal veygtlhyfv |
| 361 | snrkpskdkd kkkknpapti dirprsatiq mnnathlqer deeygyecld gkdcasffcc |
| 421 | fedcrtgawr hgrihiriak mdsyariffp tafclfnlvy wvsylyl |

[0268] An exemplary human GABRG2 nucleic acid sequence is set forth below (SEQ ID NO: 32; GenBank Accession No: NM_198904.2, Version 2, incorporated herein by reference):

| | |
|---|---|
| 1 | gtaagtgtga ggggcatgag tatacacgag tgtgcgtgtc tttccctctc ccttatttgt |
| 61 | ctccgtatga gtctctcctt gtaccctccc cctgcctcga tgatattact cccccagact |
| 121 | tggaagccgc tgccagagtg acgctttgat ggtatctgca agcgtttttg ctgatcttat |
| 181 | ctctgccccc tgaatattaa ttccctaatc tggtagcaat ccatctcccc agtgaaggac |
| 241 | ctactagagg caggtggggg gagccaccat cagatcataa gcataagaat aatacaaagg |
| 301 | ggagggattc ttctgcaacc aagaggcaag aggcgagaga aggaaaaaaa aaaaagcgat |
| 361 | gagttcgcca aatatatgga gcacaggaag ctcagtctac tcgactcctg tattttcaca |
| 421 | gaaaatgacg gtgtggattc tgctcctgct gtcgctctac cctggcttca ctagccagaa |
| 481 | atctgatgat gactatgaag attatgcttc taacaaaaca tgggtcttga ctccaaaagt |
| 541 | tcctgagggt gatgtcactg tcatcttaaa caacctgctg gaaggatatg acaataaact |
| 601 | tcggcctgat ataggagtga agccaacgtt aattcacaca gacatgtatg tgaatagcat |
| 661 | tggtccagtg aacgctatca atatggaata cactattgat atattttttg cgcaaacgtg |
| 721 | gtatgacaga cgtttgaaat ttaacagcac cattaaagtc ctccgattga acagcaacat |
| 781 | ggtggggaaa atctggattc cagacacttt cttcagaaat tccaaaaaag ctgatgcaca |
| 841 | ctggatcacc acccccaaca ggatgctgag aatttggaat gatggtcgag tgctctacac |
| 901 | cctaaggttg acaattgatg ctgagtgcca attacaattg cacaactttc caatggatga |
| 961 | acactcctgc cccttggagt tctccagtta tggctatcca cgtgaagaaa ttgtttatca |
| 1021 | atggaagcga agttctgttg aagtgggcga cacaagatcc tggaggcttt atcaattctc |
| 1081 | atttgttggt ctaagaaata ccaccgaagt agtgaagaca acttccggag attatgtggt |
| 1141 | catgtctgtc tactttgatc tgagcagaag aatgggatac tttaccatcc agacctatat |
| 1201 | cccctgcaca ctcattgtcg tcctatcctg ggtgtctttc tggatcaata aggatgctgt |
| 1261 | tccagccaga acatctttag gtatcaccac tgtcctgaca atgaccaccc tcagcaccat |
| 1321 | tgcccggaaa tcgctcccca aggtctccta tgtcacagcg atggatctct ttgtatctgt |
| 1381 | ttgtttcatc tttgtcttct ctgctctggt ggagtatggc accttgcatt attttgtcag |
| 1441 | caaccggaaa ccaagcaagg acaaagataa aaagaagaaa aaccctcttc ttcggatgtt |
| 1501 | ttccttcaag gcccctacca ttgatatccg cccaagatca gcaaccattc aaatgaataa |
| 1561 | tgctacacac cttcaagaga gagatgaaga gtacggctat gagtgtctgg acggcaagga |
| 1621 | ctgtgccagt tttttctgct gttttgaaga ttgtcgaaca ggagcttgga gacatgggag |
| 1681 | gatacatatc cgcattgcca aaatggactc ctatgctcgg atcttcttcc ccactgcctt |
| 1741 | ctgcctgttt aatctggtct attgggtctc ctacctctac ctgtgaggag gtatgggttt |
| 1801 | tactgatatg gttcttattc actgagtctc atggagagat gtctgttcta agtccactta |
| 1861 | aataatcctc tatgtggttg ataatgatct gaatctgttt ctatgtccaa acctggtaaa |
| 1921 | ttttataatg tcatattgtt tgtgcccagc cctcctttgg ttagtgtact ttgaacttcg |
| 1981 | atgtttgctg tgtttcaaac ctgcaaggca aagtaaaatt agagcaagaa cattcaaacc |
| 2041 | aaataagata tttttcagct acagcaaata aaacagtgaa agccctgact atttacagta |
| 2101 | gtggtatcct tactagattc ataatgcaat tagatagaaa aggtccaaaa ctgtacccta |
| 2161 | tgttcactcc gggtcaagtt gtgataaatt tgatcccaat agaatacctc cctcatttaa |
| 2221 | gaaaaatcat aactcacttt aaatatgaaa gcctagtcca gaaatctatt acacctttat |
| 2281 | ctcaagatag gaagaaaatt tcctccacat tcatgtacaa tgatgtaaat atttcaataa |
| 2341 | cttagaatgc ttcaagttta gtgcatgcat ctctttagat ccaaaataaa tggactgaag |
| 2401 | ttatcatcct attgtctttt attttgtgtc cttgggctat aaaagattcc tgaatgtaat |
| 2461 | tataaggatt tgggtttgga aatggaggga ggaattttca ttgccttctc cctcatgcat |
| 2521 | gaagattcga acagcttatt ttttccttgt atgacatatt acaacacttt aagtaaaata |
| 2581 | tagactggat aatcaacatt tgccacctct aaatatgccc aatttcataa ctagagtata |
| 2641 | aagtaattgt atgtgcttgc cgctattttt ttcttccttt taggatgata gatcataaca |
| 2701 | gaacttattc tccatctcaa gatctgcttc tagtgattgt gagtgccttg tgggcagaat |
| 2761 | ccttgtcatt tcctctttgg gtctgtagca ccttgcatag tgcctggcat atagttggtg |
| 2821 | ctcaataaat atggtttgaa gtgaattgcc ctcacatgct tctggcaaat ctctgtgctg |
| 2881 | gcctgaaacc agtgactcat cttctcacat aggtgttgtc aagtgatatt tgattttgta |
| 2941 | aaaataacca gtaggatcca aagaacttta gctatttatg ttcatcttca aaaaattatt |
| 3001 | ttaggcaaag tccatactcc ttttaaaaca atatttatgt cctatgtttg tgtatagaca |
| 3061 | tgactctact agggcataat tagagtttgt gtattatttt tccaggtttg gggatgagtc |
| 3121 | agtccttgcc catccacaat tttgtttgtg aacttataac aggaataagc aaaattcata |
| 3181 | cctgactagt gttcagaatg tagcattctg tgcgaaaaag tattgaagat tagcttttaa |
| 3241 | aaactgaaaa aaaaaaatga atgactcaca tagaggttga gccaatgact gtggcctcat |
| 3301 | tagattacat tgtagttaaa caaagcaatt tctccagact taaaacatga tgagttgagc |
| 3361 | tctatcttca tgtactcatc ctgaatcctt atttttctaa aatagcaccc tttgttaatt |
| 3421 | atttttatgg aaattattac tctgtcataa ttaaatcata gctagtataa ctttacagat |
| 3481 | aacctaaaaa gaatagaaaa gaagagagag tggctttgtc agtataaaac catgtaaagt |
| 3541 | catcatcaag tcatctggat gaatcttgaa acacatttag ctgccagttt tacaaacctt |
| 3601 | taatatatca gtgctccagt atataacctc aaacaaatgt aaatagaacg aattattttc |
| 3661 | ttgttttgaa ttgtcaatat attaaatgtt gactctttgg gagagttgtt ggcaagtttc |
| 3721 | aatggtgaga aacattattg tcaacttgaa atgtgttctg taatggggac actacaaaaa |
| 3781 | gctagctttc caatgtgtgc atagtattgg caatatgaat atatattata tataatctaa |
| 3841 | tacttattat aagctgctcc ctgtctatgt atttggaaac cttttcacaa agggaattgc |
| 3901 | ctaacatgtg gacttttaca ataaaaatgc tgcattctaa tccatggtgg catctca |

[0269] An exemplary human GABRQ amino acid sequence is set forth below (SEQ ID NO: 33; GenBank Accession No: EAW99424.1, Version 1, incorporated herein by reference):

| | |
|---|---|
| 1 | mgirgmlraa villlirtwl aegnypspip kfhfefssav pevvlnlfnc kncaneavvq |
| 61 | kildrvlsry dvrlrpnfgg apvpvrisiy vtsieqisem nmdytitmff hqtwkdsrla |
| 121 | yyettlnltl dyrmheklwv pdcyflnskd afvhdvtven rvfqlhpdgt vrygirlttt |
| 181 | aacsldlhkf pmdkqacnlv vesygytved iilfwddngn aihmteelhi pqftflgrti |
| 241 | tskevyfytg syirlilkfq vqrevnsylv qvywptvltt itswisfwmn ydssaarvti |
| 301 | gltsmliltt idshlrdklp niscikaidi yilvclffvf lslleyvyin ylfysrgprr |
| 361 | qprrhrrprr viaryryqqv vvgnvqdgli nvedgvsslp itpaqaplas peslgsltst |
| 421 | seqaqlatse slspltslsg qaplatgesl sdlpstseqa rhsygvrfng fqaddsifpt |
| 481 | eirnrveahg hgvthdheds neslssderh ghgpsgkpml hhgekgvqea gwdlddnndk |
| 541 | sdclaikeqf kcdtnstwgl nddelmahgq ekdsssesed scppspgcsf tegfsfdlfn |
| 601 | pdyvpkvdkw srflfplafg lfnivywvyh my |

[0270] An exemplary human GABRQ nucleic acid sequence is set forth below (SEQ ID NO: 34; GenBank Accession No: NM_018558.3, Version 3, incorporated herein by reference):

| | |
|---|---|
| 1 | gcgcccagaa cgccccggcc atgggcatcc gaggcatgct gcgagccgca gtgatcctgc |
| 61 | tgctcatcag gacctggctc gcggagggca actaccccag tcccatcccg aaattccact |
| 121 | tcgagttctc ctctgctgtg cccgaagtcg tcctgaacct cttcaactgc aaaaattgtg |
| 181 | caaatgaagc tgtggttcaa aagattttgg acagggtgct gtcaagatac gatgtccgcc |
| 241 | tgagaccgaa ttttggaggt gcccctgtgc ctgtgagaat atctatttat gtcacgagca |
| 301 | ttgaacagat ctcagaaatg aatatggact acacgatcac gatgtttttt catcagactt |
| 361 | ggaaagattc acgcttagca tactatgaga ccaccctgaa cttgaccctg gactatcgga |
| 421 | tgcatgagaa gttgtgggtc cctgactgct actttctgaa cagcaaggat gctttcgtgc |
| 481 | atgatgtgac tgtggagaat cgcgtgtttc agcttcaccc agatggaacg gtgcggtacg |
| 541 | gcatccgact caccactaca gcagcttgtt ccctggatct gcataaattc cctatggaca |
| 601 | agcaggcctg caacctggtg gtagagagct atggttacac ggttgaagac atcatattat |
| 661 | tctgggatga caatgggaac gccatccaca tgactgagga gctgcatatc cctcagttca |
| 721 | ctttcctggg aaggacgatt actagcaagg aggtgtattt ctacacaggt tcctacatac |
| 781 | gcctgatact gaagttccag gttcagaggg aagttaacag ctaccttgtg caagtctact |
| 841 | ggcctactgt cctcaccact attacctctt ggatatcgtt ttggatgaac tatgattcct |
| 901 | ctgcagccag ggtgacaatt ggcttaactt caatgctcat cctgaccacc atcgactcac |
| 961 | atctgcggga taagctcccc aacatttcct gtatcaaggc cattgatatc tatatcctcg |
| 1021 | tgtgcttgtt ctttgtgttc ctgtccttgc tggagtatgt ctacatcaac tatcttttct |
| 1081 | acagtcgagg acctcggcgc cagcctaggc gacacaggag accccgaaga gtcattgccc |
| 1141 | gctaccgcta ccagcaagtg gtggtaggaa acgtgcagga tggcctgatt aacgtggaag |
| 1201 | acggagtcag ctctctcccc atcaccccag cgcaggcccc cctggcaagc ccggaaagcc |
| 1261 | tcggttcttt gacgtccacc tccgagcagg cccagctggc cacctcggaa agcctcagcc |
| 1321 | cactcacttc tctctcaggc caggcccccc tggccactgg agaaagcctg agcgatctcc |
| 1381 | cctccacctc agagcaggcc cggcacagct atggtgttcg ctttaatggt ttccaggctg |
| 1441 | atgacagtat tattcctacc gaaatccgca accgtgtcga agcccatggc catggtgtta |
| 1501 | cccatgacca tgaagattcc aatgagagct tgagctcgga tgagcgccat ggccatggcc |
| 1561 | ccagtgggaa gcccatgctt caccatggcg agaagggtgt gcaagaagca ggctgggacc |
| 1621 | ttgatgacaa caatgacaag agcgactgcc ttgccattaa ggagcaattc aagtgtgata |
| 1681 | ctaacagtac ctggggcctt aatgatgatg agctcatggc ccatggccaa gagaaggaca |
| 1741 | gtagctcaga gtctgaggat agttgccccc caagccctgg gtgctccttc actgaagggt |
| 1801 | tctccttcga tctctttaat cctgactacg tcccaaaggt cgacaagtgg tcccggttcc |
| 1861 | tcttccctct ggcctttggg ttgttcaaca ttgtttactg ggtataccat atgtattagt |
| 1921 | cccccagtgc tccagaacag cgggagcact gtgctgtgct cctttcagtt tcttttgggt |
| 1981 | ttgtttttcc ctctttcctt |

[0271] An exemplary human GABRR1 amino acid sequence is set forth below (SEQ ID NO: 35; GenBank Accession No: EAW48558.1, Version 1, incorporated herein by reference):

| | |
|---|---|
| 1 | mlavpnmrfg ifllwwgwvl atesrmhwpg revhemskkg rpqrqrrevh edahkqvspi |
| 61 | lrrspditks pltkseqllr iddhdfsmrp gfggpaipvg vdvqveslds isevdmdftm |
| 121 | tlylrhywkd erlsfpstnn lsmtfdgrlv kkiwvpdmff vhskrsfihd tttdnvmlrv |
| 181 | qpdgkvlysl rvtvtamcnm dfsrfpldtq tcsleiesya yteddlmlyw kkgndslktd |
| 241 | erislsqfli qefhtttkla fysstgwynr lyinftlrrh ifffllqtyf patlmvmlsw |
| 301 | vsfwidrrav parvplgitt vltmstiitg vnasmprvsy ikavdiylwv sfvfvflsvl |
| 361 | eyaavnyltt vqerkeqklr eklpctsglp pprtamldgn ysdgevndld nympengekp |
| 421 | drmmvqltla sersspqrks qrssyvsmri dthaidkysr iifpaayilf nliywsifs |

[0272] An exemplary human GABRR1 nucleic acid sequence is set forth below (SEQ ID NO: 36; GenBank Accession No: NM_002042.4, Version 4, incorporated herein by reference):

| | |
|---|---|
| 1 | taataatggc cgtaagctta aaatagatcc agggaggagc tcattaacgt gaacatagaa |
| 61 | agcagttccg cacctctggc cttactcctc ttggaaattg ctttggtcca tttttacttc |
| 121 | cttttattcg acgcaccaga aaataagact tttaccaaca tttttactgc atttgacgat |
| 181 | gaactaattt agaccggcta aaataattgt tccactggga cacaggaatt caacctcagt |
| 241 | tcagaaaatc cctgacatct gacgtaggag gatttatagg tttagtggaa attgctttct |
| 301 | cctgctctcc agattgcatc ctgtgggttg attttttttt tgcatgagta aacatccttc |
| 361 | taataatgaa cagaccaata atgtcttaag agagaaaaag aacaatcttt tcctttttgc |
| 421 | tgtttctgga gagagctgtt tgaatttgga aacccatgtt ggctgtccca aatatgagat |
| 481 | ttggcatctt tcttttgtgg tggggatggg ttttggccac tgaaagcaga atgcactggc |
| 541 | ccggaagaga agtccacgag atgtctaaga aaggcaggcc ccaaagacaa agacgagaag |
| 601 | tacatgaaga tgcccacaag caagtcagcc caattctgag acgaagtcct gacatcacca |
| 661 | aatcgcctct gacaaagtca gaacagcttc tgaggataga tgaccatgat ttcagcatga |
| 721 | ggcctggctt tggaggccct gccattcctg ttggtgtgga tgtgcaggtg gagagtttgg |
| 781 | atagcatctc agaggttgac atggacttta cgatgaccct ctacctgagg cactactgga |
| 841 | aggacgagag gctgtctttt ccaagcacca acaacctcag catgacgttt gacggccggc |
| 901 | tggtcaagaa gatctgggtc cctgacatgt ttttcgtgca ctccaaacgc tccttcatcc |
| 961 | acgacaccac cacagacaac gtcatgttgc gggtccagcc tgatgggaaa gtgctctata |
| 1021 | gtctcagggt tacagtaact gcaatgtgca acatggactt cagccgattt cccttggaca |
| 1081 | cacaaacgtg ctctcttgaa attgaaagct atgcctatac agaagatgac ctcatgctgt |
| 1141 | actggaaaaa gggcaatgac tccttaaaga cagatgaacg gatctcactc tcccagttcc |
| 1201 | tcattcagga attccacacc accaccaaac tggctttcta cagcagcaca ggctggtaca |
| 1261 | accgtctcta cattaatttc acgttgcgtc gccacatctt cttcttcttg ctccaaactt |
| 1321 | atttccccgc taccctgatg gtcatgctgt cctgggtgtc cttctggatc gaccgcagag |
| 1381 | ccgtgcctgc cagagtcccc ttaggtatca caacggtgct gaccatgtcc accatcatca |
| 1441 | cgggcgtgaa tgcctccatg ccgcgcgtct cctacatcaa ggccgtggac atctacctct |
| 1501 | gggtcagctt tgtgttcgtg ttcctctcgg tgctggagta tgcggccgtc aactacctga |
| 1561 | ccactgtgca ggagaggaag gaacagaagc tgcgggagaa gcttccctgc accagcggat |
| 1621 | tacctccgcc ccgcactgcg atgctggacg gcaactacag tgatggggag gtgaatgacc |
| 1681 | tggacaacta catgccagag aatggagaga agcccgacag gatgatggtg cagctgaccc |
| 1741 | tggcctcaga gaggagctcc ccacagagga aaagtcagag aagcagctat gtgagcatga |
| 1801 | gaatcgacac ccacgccatt gataaatact ccaggatcat ctttccagca gcatacattt |
| 1861 | tattcaattt aatatactgg tctattttct cctagatgct tgtaattcta caaatttcac |
| 1921 | atttccatgg catgcactac agaaataact gtataatgaa aaagtattta aggatatggt |
| 1981 | taaaaaaaaa tcccaggacc cacccatgtt ttcactatcc cttctgcagc tttccaaagc |
| 2041 | tacattgacg agacacttac tggtttaatt tgcacttatt aaccatctat tgaatacaca |
| 2101 | gcattatatt aggtgctgca ggaaatacga cactgtagcg actgatgtta gttgttaccc |
| 2161 | agatcccctg gaaaagcaca ctaccagtgt tgtgggcaca tttagttcca cccgttagac |
| 2221 | ccttgatgct attcacatga ataatttatt ttcctcaagt gtcattacat tgttcaggct |
| 2281 | acgtgaactt ggaagcacct acaggccatt tgcatgaaat tcacatgcac ctaaatcctc |
| 2341 | actttgacag aaactcatgc ttcagtttat aacctattac ctattttgta tgcgactcca |
| 2401 | cctccgcatg tttattttaa taaaaggcaa tgataacatt cacattattt ttctttatat |
| 2461 | gctgtggttc acaggcttta ccccttcaca agaaaagctc tttagattgg cgcaattgct |
| 2521 | tctgattttg gtgaaatttt ccctggtagg gaaactttga agataagagt acacacatgc |
| 2581 | attttgtctg ttgtgtcata gaggtaacta ggctagaaaa tttgtgttta aatgttccct |
| 2641 | attttatata atcaccactt catgtttctt cttcttggag catgtccttg ttcaaagaga |
| 2701 | agtgctttct cagtgatgtg atatcttcac tgaggaactt gggtagagaa tgatttcttc |
| 2761 | tgcataaaca cttcaaggaa atacataatt tgggactact tgtaactcat tagaatgaga |
| 2821 | aatactcaca tggtttctta agagaaaaag aacatcggaa agcaaaataa atgggaagat |
| 2881 | atcactggac atctgcattt atactcgaaa taccagcatt ttctatggac cagaaaactg |
| 2941 | ccatcaccta gaccacacag cccagatacc aggcagacgg atggcccaat ggcaactgat |
| 3001 | gtcagggcat ggggtaaagg agagggttct aatctggtgt atcacttaaa aacagttatt |
| 3061 | tatattatat atctgctata tagatcaacc tccaccaaac ttacccaaac agcatttgtt |
| 3121 | ttatttgaaa ctcactttaa taaagtgaat tatatacaca aaaaaaaaaa aaaa |

[0273] An exemplary human CLDN1 amino acid sequence is set forth below (SEQ ID NO: 37; GenBank Accession No: CAG33419.1, Version 1, incorporated herein by reference):

| | |
|---|---|
| 1 | managlqllg filaflgwig aivstalpqw riysyagdni vtaqamyegl wmscvsqstg |
| 61 | qiqckvfdsl lnlsstlqat ralmvvgill gviaifvatv gmkcmkcled devqkmrmav |
| 121 | iggaifllag lailvatawy gnrivqefyd pmtpvnarye fgqalftgwa aaslcllgga |
| 181 | llccscprkt tsyptprpyp kpapssgkdy v |

[0274] An exemplary human CLDN1 nucleic acid sequence is set forth below (SEQ ID NO: 38; GenBank Accession No: NM_021101.4, Version 4, incorporated herein by reference):

| | |
|---|---|
| 1 | gtctcagttc ccgagcctgg gagcaaccgc agcttctagt atccagactc cagcgccgcc |
| 61 | ccgggcgcgg accccaaccc cgacccagag cttctccagc ggcggcgcag cgagcagggc |
| 121 | tccccgcctt aacttcctcc gcggggccca gccaccttcg ggagtccggg ttgcccacct |
| 181 | gcaaactctc cgccttctgc acctgccacc cctgagccag cgcgggcgcc cgagcgagtc |
| 241 | atggccaacg cggggctgca gctgttgggc ttcattctcg ccttcctggg atggatcggc |
| 301 | gccatcgtca gcactgccct gccccagtgg aggatttact cctatgccgg cgacaacatc |
| 361 | gtgaccgccc aggccatgta cgaggggctg tggatgtcct gcgtgtcgca gagcaccggg |
| 421 | cagatccagt gcaaagtctt tgactccttg ctgaatctga gcagcacatt gcaagcaacc |
| 481 | cgtgccttga tggtggttgg catcctcctg ggagtgatag caatctttgt ggccaccgtt |
| 541 | ggcatgaagt gtatgaagtg cttggaagac gatgaggtgc agaagatgag gatggctgtc |
| 601 | attgggggtg cgatatttct tcttgcaggt ctggctattt tagttgccac agcatggtat |
| 661 | ggcaatagaa tcgttcaaga attctatgac cctatgaccc cagtcaatgc caggtacgaa |
| 721 | tttggtcagg ctctcttcac tggctgggct gctgcttctc tctgccttct gggaggtgcc |
| 781 | ctactttgct gttcctgtcc ccgaaaaaca acctcttacc caacaccaag gccctatcca |
| 841 | aaacctgcac cttccagcgg gaaagactac gtgtgacaca gaggcaaaag gagaaaatca |
| 901 | tgttgaaaca aaccgaaaat ggacattgag atactatcat taacattagg accttagaat |
| 961 | tttgggtatt gtaatctgaa gtatggtatt acaaaacaaa caaacaaaca aaaaacccat |
| 1021 | gtgttaaaat actcagtgct aaacatggct taatcttatt ttatcttctt tcctcaatat |
| 1081 | aggagggaag atttttccat ttgtattact gcttcccatt gagtaatcat actcaactgg |
| 1141 | gggaaggggt gctccttaaa tatatataga tatgtatata tacatgtttt tctattaaaa |
| 1201 | atagacagta aaatactatt ctcattatgt tgatactagc atacttaaaa tatctctaaa |
| 1261 | ataggtaaat gtatttaatt ccatattgat gaagatgttt attggtatat tttctttttc |
| 1321 | gtctatatat acatatgtaa cagtcaaata tcatttactc ttcttcatta gctttgggtg |
| 1381 | cctttgccac aagacctagc ctaatttacc aaggatgaat tctttcaatt cttcatgcgt |
| 1441 | gcccttttca tatacttatt ttatttttta ccataatctt atagcacttg catcgttatt |
| 1501 | aagcccttat ttgttttgtg tttcattggt ctctatctcc tgaatctaac acatttcata |
| 1561 | gcctacattt tagtttctaa agccaagaag aatttattac aaatcagaac tttggaggca |
| 1621 | aatctttctg catgaccaaa gtgataaatt cctgttgacc ttcccacaca atccctgtac |
| 1681 | tctgacccat agcactcttg tttgctttga aaatatttgt ccaattgagt agctgcatgc |
| 1741 | tgttccccca ggtgttgtaa cacaacttta ttgattgaat ttttaagcta cttattcata |
| 1801 | gttttatatc cccctaaact acctttttgt tccccattcc ttaattgtat tgttttccca |
| 1861 | agtgtaatta tcatgcgttt tatatcttcc taataaggtg tggtctgttt gtctgaacaa |
| 1921 | agtgctagac tttctggagt gataatctgg tgacaaatat tctctctgta gctgtaagca |
| 1981 | agtcacttaa tctttctacc tcttttttct atctgccaaa ttgagataat gatacttaac |
| 2041 | cagttagaag aggtagtgtg aatattaatt agtttatatt actctcattc tttgaacatg |
| 2101 | aactatgcct atgtagtgtc tttatttgct cagctggctg agacactgaa gaagtcactg |
| 2161 | aacaaaacct acacacgtac cttcatgtga ttcactgcct tcctctctct accagtctat |
| 2221 | ttccactgaa caaaacctac acacatacct tcatgtggtt cagtgccttc ctctctctac |
| 2281 | cagtctattt ccactgaaca aaacctacgc acataccttc atgtggctca gtgccttcct |
| 2341 | ctctctacca gtctatttcc attctttcag ctgtgtctga catgtttgtg ctctgttcca |
| 2401 | ttttaacaac tgctcttact tttccagtct gtacagaatg ctatttcact tgagcaagat |
| 2461 | gatgtaatgg aaagggtgtt ggcattggtg tctggagacc tggatttgag tcttggtgct |
| 2521 | atcaatcacc gtctgtgttt gagcaaggca tttggctgct gtaagcttat tgcttcatct |
| 2581 | gtaagcggtg gtttgtaatt cctgatcttc ccacctcaca gtgatgttgt ggggatccag |
| 2641 | tgagatagaa tacatgtaag tgtggttttg taatttaaaa agtgctatac taagggaaag |
| 2701 | aattgaggaa ttaactgcat acgttttggt gttgcttttc aaatgtttga aaacaaaaaa |
| 2761 | aatgttaaga aatgggtttc ttgccttaac cagtctctca agtgatgaga cagtgaagta |
| 2821 | aaattgagtg cactaaacaa ataagattct gaggaagtct tatcttctgc agtgagtatg |
| 2881 | gcccgatgct ttctgtggct aaacagatgt aatgggaaga aataaaagcc tacgtgttgg |
| 2941 | taaatccaac agcaagggag atttttgaat cataataact cataaggtgc tatctgttca |
| 3001 | gtgatgccct cagagctctt gctgttagct ggcagctgac gctgctagga tagttagttt |
| 3061 | ggaaatggta cttcataata aactacacaa ggaaagtcag ccactgtgtc ttatgaggaa |
| 3121 | ttggacctaa taaattttag tgtgccttcc aaacctgaga atatatgctt ttggaagtta |
| 3181 | aaatttaaat ggcttttgcc acatacatag atcttcatga tgtgtgagtg taattccatg |
| 3241 | tggatatcag ttaccaaaca ttacaaaaaa attttatggc ccaaaatgac caacgaaatt |
| 3301 | gttacaatag aatttatcca attttgatct ttttatattc ttctaccaca cctggaaaca |
| 3361 | gaccaataga cattttgggg ttttataata ggaatttgta taaagcatta ctctttttca |
| 3421 | ataaattgtt ttttaattta aaaaaaggat ta |

[0275] An exemplary human CLDN2 amino acid sequence is set forth below (SEQ ID NO: 39; GenBank Accession No: AAH71747.1, Version 1, incorporated herein by reference):

| | |
|---|---|
| 1 | maslglqlvg yilgllgllg tlvamllpsw ktssyvgasi vtavgfskgl wmecathstg |
| 61 | itqcdiystl lglpadigaa qammvtssai sslaciisvv gmrctvfcge srakdrvava |
| 121 | ggvffilggl lgfipvawnl hgilrdfysp lvpdsmkfei gealylgiis slfsliagii |
| 181 | lcfscssqrn rsnyydayqa qplatrsspr pgqppkvkse fnsysltgyv |

[0276] An exemplary human CLDN2 nucleic acid sequence is set forth below (SEQ ID NO: 40; GenBank Accession No: NM_020384.3, Version 3, incorporated herein by reference):

| | |
|---|---|
| 1 | aagtctctga cccacggctc agatttgcag atggattttg caaagctgtg gttaacgatt |
| 61 | agaaatcctt tatcacctca gcccgtggcc ccttgtactt cgctcccctc cctcaggatc |
| 121 | cctttctccc tctccagggg catctccccc tccaaggctc tgcaaagaac tgccctgtct |
| 181 | tctagatgcc ttcttgaggc tgcttgtggc cacccacaga cacttgtaag gaggagagaa |
| 241 | gtcagcctgg cagagagact ctgaaatgag ggattagagg tgttcaagga gcaagagctt |
| 301 | cagcctgaag acaagggagc agtccctgaa gacgcttcta ctgagaggtc tgccatggcc |
| 361 | tctcttggcc tccaacttgt gggctacatc ctaggccttc tggggctttt gggcacactg |
| 421 | gttgccatgc tgctccccag ctggaaaaca agttcttatg tcggtgccag cattgtgaca |
| 481 | gcagttggct tctccaaggg cctctggatg gaatgtgcca cacacagcac aggcatcacc |
| 541 | cagtgtgaca tctatagcac ccttctgggc ctgcccgctg acatccaggc tgcccaggcc |
| 601 | atgatggtga catccagtgc aatctcctcc ctggcctgca ttatctctgt ggtgggcatg |
| 661 | agatgcacag tcttctgcca ggaatcccga gccaaagaca gagtggcggt agcaggtgga |
| 721 | gtctttttca tccttggagg cctcctggga ttcattcctg ttgcctggaa tcttcatggg |
| 781 | atcctacggg acttctactc accactggtg cctgacagca tgaaatttga gattggagag |
| 841 | gctctttact tgggcattat ttcttccctg ttctccctga tagctggaat catcctctgc |
| 901 | ttttcctgct catcccagag aaatcgctcc aactactacg atgcctacca agcccaacct |
| 961 | cttgccacaa ggagctctcc aaggcctggt caacctccca aagtcaagag tgagttcaat |
| 1021 | tcctacagcc tgacagggta tgtgtgaaga accaggggcc agagctgggg ggtggctggg |
| 1081 | tctgtgaaaa acagtggaca gcaccccgag ggccacaggt gagggacact accactggat |
| 1141 | cgtgtcagaa ggtgctgctg aggatagact gactttggcc attggattga gcaaaggcag |
| 1201 | aaatgggggc tagtgtaaca gcatgcaggt tgaattgcca aggatgctcg ccatgccagc |
| 1261 | ctttctgttt tcctcacctt gctgctcccc tgccctaagt ccccaaccct caacttgaaa |
| 1321 | ccccattccc ttaagccagg actcagagga tccctttgcc ctctggttta cctgggactc |
| 1381 | catccccaaa cccactaatc acatcccact gactgaccct ctgtgatcaa agaccctctc |
| 1441 | tctggctgag gttggctctt agctcattgc tggggatggg aaggagaagc agtggctttt |
| 1501 | gtgggcattg ctctaaccta cttctcaagc ttccctccaa agaaactgat tggccctgga |
| 1561 | acctccatcc cactcttgtt atgactccac agtgtccaga ctaatttgtg catgaactga |
| 1621 | aataaaacca tcctacggta tccagggaac agaaagcagg atgcaggatg ggaggacagg |
| 1681 | aaggcagcct gggacattta aaaaaataaa aatgaaaaaa aaacccagaa cccatttctc |
| 1741 | agggcacttt ccagaattct ctcatatttg tgggctggga tcaagcctgc agcttgagga |
| 1801 | aagcacaagg aaaggaaaga agatctggtg gaaagctcag gtggcagcgg actctgactc |
| 1861 | cactgaggaa ctgcctcaga agctgcgatc acaactttgg ctgaagcccc tgcctcactc |
| 1921 | tagggcacct gacctggcct cttgcctaaa ccacaaggct aagggctata gacaatggtt |
| 1981 | tccttaggaa cagtaaacca gtttttctag ggatggccct tggctggggg atgacagtgt |
| 2041 | gggagctgtg gggtactgag gaagacacca ttccttgacg gtgtctaaga agccaggtgg |
| 2101 | atgtgtgtgg tggctccagt gggtgtttct actctgccag tgagaggcag ccccctagaa |
| 2161 | actcttcagg cgtaatggaa aatcagctca aatgagatca ggccccccca gggtccaccc |
| 2221 | acagagcact acagagcctc tgaaagacca tagcaccaag cgagcccctt cagattcccc |
| 2281 | cactgtccat cggaagatgc tccagagtgg ctagagggca tctaagggct ccagcatggc |
| 2341 | atatccatgc ccacggtgct gtgtccatga tctgagtgat agctgcactg ctgcctggga |
| 2401 | ttgcagctga ggtgggagtg gagaatggtt cccaggaaga cagttccacc tctaaggtcc |
| 2461 | gaaaatgttc cctttaccct ggagtgggag tgaggggtca tacaccaaag gtattttccc |
| 2521 | tcaccagtct aggcatgact ggcttctgaa aaattccagc acacctcctc gaacctcatt |
| 2581 | gtcagcagag agggcccatc tgttgtctgt aacatgcctt tcacatgtcc accttcttgc |
| 2641 | catgttccag ctgctctccc aacctggaag gccgtctccc cttagccaag tcctcctcag |
| 2701 | gcttggagaa cttcctcagc gtcacctcct tcattgagcc ttctctgatc actccatccc |
| 2761 | tctcctaccc ctccctcccc caaccctcaa tgtataaatt gcttcttgat gcttagcatt |
| 2821 | cacaattttt gattgatcgt tatttgtgtg tgtgtgtccg atctcacaag tatattgtaa |
| 2881 | acccttcggt gggtgggggc catatcctag acctctctgt atcccccaga ctatctgtaa |
| 2941 | cagtgccagg cacacagtag gtgatcaata aacacttgtt gattgagaaa aaaaaaaa |

[0277] An exemplary human EYA1 amino acid sequence is set forth below (SEQ ID NO: 41; GenBank Accession No: AAI21799.1, Version 1, incorporated herein by reference):

| | |
|---|---|
| 1 | mfpsnawafy flsfltnsrp yphilptpss qtmaaygqtq fttgmqqata yatypqpgqp |
| 61 | ygissygalw agikteggls qsqspgqtgf lsygtsfstp qpgqapysyq mqgssfttss |
| 121 | giytgnnslt nssgfnssqq dypsypsfgq gqyaqyynss pypahymtss ntspttpstn |
| 181 | atyqlqepps gitsqavtdp taeystihsp stpikdsdsd rlrrgsdgks rgrgrrnnnp |
| 241 | spppdsdler vfiwdldeti ivfhslltgs yanrygrdpp tsyslglrme emifnladth |
| 301 | lffndleecd qvhiddvssd dngqdlstyn fgtdgfpaaa tsanlclatg vrggvdwmrk |
| 361 | lafryrrvke iyntyknnvg gllgpakrea wlqlraeiea ltdswltlal kalslihsrt |
| 421 | ncvnilvttt qlipalakvl lyglgivfpi eniysatkig kescferiiq rfgrkvvyvv |
| 481 | igdgveeeqg akkhampfwr isshsdlmal hhaleleyl |

[0278] An exemplary human EYA1 nucleic acid sequence is set forth below (SEQ ID NO: 42; GenBank Accession No: NM_001288574.1, Version 1, incorporated herein by reference):

| | |
|---|---|
| 1 | aaaccaataa ggttaggaca agagaatagc tgtggtttgc gttgcaaaaa ccaaaaaaaa |
| 61 | aaaaaaaaaa aaaaaaagaa agccccgagg ctccatgggc agacctacaa ggctgcgcaa |
| 121 | acaaatcgag ggatgagatt ctgctgtttc tttgtctagg gttctcagat gctatctgcc |
| 181 | gctgctgttt ggtggggaag gagcgctggg cgcaaagctg ttaccaaaca gaacggtggg |
| 241 | agctgatggc tccgagtttg gggcgaggta gaaactctcc agtgccactt ccgactttaa |
| 301 | gccttcctgt tgccgtccac tgtggcgggt ttcttcctgg ggaacacgtt ttcgctcagt |
| 361 | cgctcggcag cccgagcctg cggcagcggc caggcgcctg ccccctgcgc cgagctttcc |
| 421 | cctgcagagg cgctccactc ccagaagcgc cgcggctgca ccagagcgcc tgagagcccc |
| 481 | cgcgcgtacc catccaggag caaaactatg tcaggaatgg aggtttgcta acccagaaaa |
| 541 | ttcgaaggaa cacattaaac tggtggatgc agcagatgta agcgctgtgc aaacatctca |
| 601 | agccagttca gatgttgctg tttcctcaag ttgcaggtct atggaaatgc aggatctaac |
| 661 | cagcccgcat agccgtctga gtggtagtag tgaatccccc agtggcccca aactcggtaa |
| 721 | ctctcatata aatagtaatt ccatgactcc caatggcacc gaagttaaaa cagagccaat |
| 781 | gagcagcagt gaaacagctt caacgacagc cgacgggtct ttaaacaatt tctcaggttc |
| 841 | agcaattggg agcagtagtt tcagcccacg accaactcac cagttctctc caccacagat |
| 901 | ttacccttcc aaaccatacc cacatattct ccctacccct tcctcacaaa ctatggctgc |
| 961 | atatgggcaa acacagttta ccacaggaat gcaacaagct acagcctatg ccacgtaccc |
| 1021 | acagccagga cagccgtacg gcatttcctc atatggcatc aagactgaag gtggattgtc |
| 1081 | acagtctcag tcacctggac agacaggatt tctcagctat ggcacaagct tcagtacccc |
| 1141 | tcaacctgga caggcaccat acagctacca gatgcaaggt agcagtttta caacatcatc |
| 1201 | aggaatatat acaggaaata attcactcac aaattcctct ggatttaata gttcacagca |
| 1261 | ggactatccg tcttatccca gttttggcca gggtcagtac gcacagtatt ataacagctc |
| 1321 | accgtatcca gcacattata tgaccagcag caacaccagc ccaacgacac catccaccaa |
| 1381 | tgccacttac cagcttcaag aaccgccatc tggcatcacc agccaagcag ttacagatcc |
| 1441 | cacagcagag tacagcacaa tccacagccc atcaacaccc attaaagatt cagattctga |
| 1501 | tcgattgcgt cgaggttcag atgggaaatc acgtggacgg ggccgaagaa acaataatcc |
| 1561 | ttcacctccc ccagattctg atcttgagag agtgttcatc tgggacttgg atgagacaat |
| 1621 | cattgttttc cactccttgc ttactgggtc ctacgccaac agatatggga gggatccacc |
| 1681 | cacttcagtt tcccttggac tgcgaatgga agaaatgatt ttcaacttgg cagacacaca |
| 1741 | tttatttttt aatgacttag aagaatgtga ccaagtccat atagatgatg tttcttcaga |
| 1801 | tgataacgga caggacctaa gcacatataa ctttggaaca gatggctttc ctgctgcagc |
| 1861 | aaccagtgct aacttatgtt tggcaactgg tgtacggggc ggtgtggact ggatgagaaa |
| 1921 | gttggccttc cgctacagac gggtaaaaga gatctacaac acctacaaaa ataatgttgg |
| 1981 | aggtctgctt ggtccagcta agagggaagc ctggctgcag ttgagggccg aaattgaagc |
| 2041 | cctgaccgac tcctggttga cactggccct gaaagcactc tcgctcattc actcccggac |
| 2101 | aaactgtgtg aatattttag taacaactac tcagctcatc ccagcattgg cgaaagtcct |
| 2161 | gctgtatggg ttaggaattg tatttccaat agaaaatatt tacagtgcaa ctaaaatagg |
| 2221 | aaaagaaagc tgttttgaga gaataattca aaggtttgga agaaaagtgg tgtatgttgt |
| 2281 | tataggagat ggtgtagaag aagaacaagg agcaaaaaag cacgcgatgc ccttctggag |
| 2341 | gatctccagc cactcggacc tcatggccct gcaccatgcc ttggaactgg agtacctgta |
| 2401 | acagcgctcg gcactttgac agcgcacagc tgctctgtga ccagggacag atccagcagg |
| 2461 | ccccagtctc gcatcagcgc cggcctccag aacttagcaa tttccgcctg gtgatgcgca |
| 2521 | gttgctgtca gtcttgacct ctgcctttgt ggtgaatgga ggaccacgtc tatttcatca |
| 2581 | gaacagctgt tgactctagt actgtgaatc cagtgaaaat aagccatgag aatgttttag |
| 2641 | cacagcgtta tgtgtctgcc acattaacta cacggttcaa acctgtgaag aaaggacctg |
| 2701 | caaacgcttc agttgttagc attttcaatg tgatataaac agcttctcca atacagcaaa |
| 2761 | cctaattgca caacagagac tgaaatgtgt ttcctgaata ccagtggagg aattttcttg |
| 2821 | taaagaaggt ttactttttg gtgtctcata cccagggtaa tctgtacatc tctacttatt |
| 2881 | tatgaacaga ctttttttaa aaagataaaa aaacagcttt attgaggtat aattcaccca |
| 2941 | ccagactttt ttaaacatca aataattgaa gagacaatag cattagaaat aagtgattaa |
| 3001 | aggcctctgc ctcacaacat ggcaagtaca gtactttgaa ttttagcaca ttgcatagta |
| 3061 | gttttaagta tgtctaattt aaacgtataa tatgtacatc actgagacaa tcatgtacag |
| 3121 | aaagaatttt tggtgtaaat ttgtaataat ggataattct tttacatatt gtttagggaa |
| 3181 | atgatattga aaggtagcaa tgcctggata gtgaagcatg aggcagcacg tgcacaaatt |
| 3241 | catgtgccgt gccttatctg agttttcggt ataaatatgt agataatgga tttttttttt |
| 3301 | ttagataatg ttgtcaagac caaaagcatg gatgtcaagt gtcagtaagg attttgtttt |
| 3361 | ctaaaatttt ttcctgcatc agttcttctg agggccttga tgaaataaca cagcagtttc |
| 3421 | ttaaacaatt tgaaacaaaa tgagctctcc taccacctca ctttttcatt tccacactaa |
| 3481 | tgtattatat gtaactactt ggaaaaaata attattcaaa tgcttcttcc cacaaagaat |
| 3541 | atagatgata gtagatatat tttattaata aaatggttca tgaatcggag actaacaaag |
| 3601 | ttttcatgtg ctcagaatta ttaattatcg tgtctgcatt ttctttcgat aaaggaagac |
| 3661 | acacgatgct aatccggaaa tcagcaaact ttgcattact ccctatgtgc gtattttctc |
| 3721 | tttcttcctg tcaccctgag gaaggttcat tgccattgtc atcaccatgg aaacaacgtt |
| 3781 | cctctccacc tgcattatgt actacatgac aggcatcaat ctggggaaat aataaaatta |
| 3841 | tcacctttgt cagaccataa gagtttctcc aaaagtggtc agtttggctg ggcaatattt |
| 3901 | tctctcatct aacaaacaca atccattgtc atgaaattac ccttaggatg agtcttcttt |
| 3961 | aatcaatcat atattgggcg gaaaaaacac cagctttgac ccgaagtagt tgaagagcta |
| 4021 | cttcattctt ttctgaagtt gtgtgttgct gctagaaata gtcatttgtg aattatccaa |
| 4081 | attgtttaaa ttcacaattg aattagtttt ttcttccttt ttgcttgaag caaacagttg |
| 4141 | acaattttta accttttcat tttatgtttt tgtactctgc agactgaaaa gacaaagttt |
| 4201 | atcttggcct tactgtataa aggtgtgctg tgtccaccgt tgtgtacaga atttttcttc |
| 4261 | attaattttg tgtttaagtt aataaaattt atttgtgatg tactgtaaaa aaaaaaaaaa |
| 4321 | aaa |

[0279] An exemplary human SNAI1 amino acid sequence is set forth below (SEQ ID NO: 43; GenBank Accession No: CAB52414.1, Version 1, incorporated herein by reference):

| | |
|---|---|
| 1 | mprsflvrkp sdpnrkpnys elqdsnpeft fqqpydqahl laaipppeil nptaslpmli |
| 61 | wdsvlapqaq piawaslrlq esprvaelts lsdedsgkgs qppsppspap ssfsstsvss |
| 121 | leaeayaafp glgqvpkqla qlseakdlqa rkafnckycn keylslgalk mhirshtlpc |
| 181 | vcgtcgkafs rpwllqghvr thtgekpfsc phcsrafadr snlrahlqth sdvkkyqcqa |
| 241 | cartfsrmsl lhkhqesgcs gcpr |

[0280] An exemplary human SNAI1 nucleic acid sequence is set forth below (SEQ ID NO: 44; GenBank Accession No: NM_005985.3, Version 3, incorporated herein by reference):

| | |
|---|---|
| 1 | attcattgcg ccgcggcacg gcctagcgag tggttcttct gcgctactgc tgcgcgaatc |
| 61 | ggcgacccca gtgcctcgac cactatgccg cgctctttcc tcgtcaggaa gccctccgac |
| 121 | cccaatcgga agcctaacta cagcgagctg caggactcta atccagagtt taccttccag |
| 181 | cagccctacg accaggccca cctgctggca gccatcccac ctccggagat cctcaacccc |
| 241 | accgcctcgc tgccaatgct catctgggac tctgtcctgg cgccccaagc ccagccaatt |
| 301 | gcctgggcct cccttcggct ccaggagagt cccagggtgg cagagctgac ctccctgtca |
| 361 | gatgaggaca gtgggaaagg ctcccagccc cccagcccac cctcaccggc tccttcgtcc |
| 421 | ttctcctcta cttcagtctc ttccttggag gccgaggcct atgctgcctt cccaggcttg |
| 481 | ggccaagtgc ccaagcagct ggcccagctc tctgaggcca aggatctcca ggctcgaaag |
| 541 | gccttcaact gcaaatactg caacaaggaa tacctcagcc tgggtgccct caagatgcac |
| 601 | atccgaagcc acacgctgcc ctgcgtctgc ggaacctgcg ggaaggcctt ctctaggccc |
| 661 | tggctgctac aaggccatgt ccggacccac actggcgaga agcccttctc ctgtccccac |
| 721 | tgcagccgtg ccttcgctga ccgctccaac ctgcgggccc acctccagac ccactcagat |
| 781 | gtcaagaagt accagtgcca ggcgtgtgct cggaccttct cccgaatgtc cctgctccac |
| 841 | aagcaccaag agtccggctg ctcaggatgt ccccgctgac cctcgaggct ccctcttcct |
| 901 | ctccatacct gcccctgcct gacagccttc cccagctcca gcaggaagga ccccacatcc |
| 961 | ttctcactgc catggaattc cctcctgagt gccccacttc tggccacatc agccccacag |
| 1021 | gactttgatg aagaccattt tctggttctg tgtcctctgc ctgggctctg gaagaggcct |
| 1081 | tcccatggcc atttctgtgg agggagggca gctggccccc agccctgggg gattcctgag |
| 1141 | ctggcctgtc tgcgtgggtt tttgtatcca gagctgtttg gatacagctg ctttgagcta |
| 1201 | caggacaaag gctgacagac tcactgggaa gctcccaccc cactcagggg accccactcc |
| 1261 | cctcacacac acccccccac aaggaaccct caggccaccc tccacgaggt gtgactaact |
| 1321 | atgcaataat ccacccccag gtgcagcccc agggcctgcg gaggcggtgg cagactagag |
| 1381 | tctgagatgc cccgagccca ggcagctatt tcagcctcct gtttggtggg gtggcacctg |
| 1441 | tttcccgggc aatttaacaa tgtctgaaaa gggactgtga gtaatggctg tcacttgtcg |
| 1501 | ggggcccaag tggggtgctc tggtctgacc gatgtgtctc ccagaactat tctgggggcc |
| 1561 | cgacaggtgg gcctgggagg aagatgttta catttttaaa ggtacactgg tatttatatt |
| 1621 | tcaaacattt tgtatcaagg aaacgttttg tatagttata tgtacagttt attgatattc |
| 1681 | aataaagcag ttaatttata tattaaaaaa aaaaaaaaaa aa |

[0281] An exemplary human TGFB2 amino acid sequence is set forth below (SEQ ID NO: 45; GenBank Accession No: AAH99635.1, Version 1, incorporated herein by reference):

| | |
|---|---|
| 1 | mhycvlsafl ilhlvtvals lstcstldmd qfmrkrieai rgqilsklkl tsppedypep |
| 61 | eevppevisi ynstrdllqe kasrraaace rersdeeyya kevykidmpp ffpsenaipp |
| 121 | tfyrpyfriv rfdvsamekn asnlvkaefr vfrlqnpkar vpeqrielyq ilkskdltsp |
| 181 | tqryidskvv ktraegewls fdvtdavhew lhhkdrnlgf kislhcpcct fvpsnnyiip |
| 241 | nkseelearf agidgtstyt sgdqktikst rkknsgktph lllmllpsyr lesqqtnrrk |
| 301 | kraldaaycf rnvgdncclr plyidfkrdl gwkwihepkg ynanfcagac pylwssdtqh |
| 361 | srvlslynti npeasaspcc vsqdleplti lyyigktpki eqlsnmivks ckcs |

[0282] An exemplary human TGFB2 nucleic acid sequence is set forth below (SEQ ID NO: 46; GenBank Accession No: NM_001135599.3, Version 3, incorporated herein by reference):

| | |
|---|---|
| 1 | agacacgtgg ttcagagaga acttataaat ctcccctccc cggcaagatc gtgatgttat |
| 61 | ctgctggcag cagaaggttc gctccgagcg gagctccaga agctcctgac aagagaaaga |
| 121 | cagattgaga tagagataga aagagaaaga gagaaagaga cagcagagcg agagcgcaag |
| 181 | tgaaagaggc aggggagggg gatggagaat attagcctga cggtctaggg agtcatccag |
| 241 | gaacaaactg aggggctgcc cggctgcaga caggaggaga cagagaggat ctattttagg |
| 301 | gtggcaagtg cctacctacc ctaagcgagc aattccacgt tggggagaag ccagcagagg |
| 361 | ttgggaaagg gtgggagtcc aagggagccc ctgcgcaacc ccctcaggaa taaaactccc |
| 421 | cagccagggt gtcgcaaggg ctgccgttgt gatccgcagg gggtgaacgc aaccgcgacg |
| 481 | gctgatcgtc tgtggctggg ttggcgtttg gagcaagaga aggaggagca ggagaaggag |
| 541 | ggagctggag gctggaagcg tttgcaagcg gcggcggcag caacgtggag taaccaagcg |
| 601 | ggtcagcgcg cgcccgccag ggtgtaggcc acggcgcgca gctcccagag caggatccgc |
| 661 | gccgcctcag cagcctctgc ggcccctgcg gcacccgacc gagtaccgag cgccctgcga |
| 721 | agcgcaccct cctccccgcg gtgcgctggg ctcgccccca gcgcgcgcac acgcacacac |
| 781 | acacacacac acacacacgc acgcacacac gtgtgcgctt ctctgctccg gagctgctgc |
| 841 | tgctcctgct ctcagcgccg cagtggaagg caggaccgaa ccgctccttc tttaaatata |
| 901 | taaatttcag cccaggtcag cctcggcggc ccccctcacc gcgctcccgg cgcccctccc |
| 961 | gtcagttcgc cagctgccag ccccgggacc ttttcatctc ttcccttttg gccggaggag |
| 1021 | ccgagttcag atccgccact ccgcacccga gactgacaca ctgaactcca cttcctcctc |
| 1081 | ttaaatttat ttctacttaa tagccactcg tctctttttt tccccatctc attgctccaa |
| 1141 | gaattttttt cttcttactc gccaaagtca gggttccctc tgcccgtccc gtattaatat |
| 1201 | ttccactttt ggaactactg gccttttctt tttaaaggaa ttcaagcagg atacgttttt |
| 1261 | ctgttgggca ttgactagat tgtttgcaaa agtttcgcat caaaaacaac aacaacaaaa |
| 1321 | aaccaaacaa ctctccttga tctatacttt gagaattgtt gatttctttt ttttattctg |
| 1381 | acttttaaaa acaacttttt tttccacttt tttaaaaaat gcactactgt gtgctgagcg |
| 1441 | cttttctgat cctgcatctg gtcacggtcg cgctcagcct gtctacctgc agcacactcg |
| 1501 | atatggacca gttcatgcgc aagaggatcg aggcgatccg cgggcagatc ctgagcaagc |
| 1561 | tgaagctcac cagtccccca gaagactatc ctgagcccga ggaagtcccc ccggaggtga |
| 1621 | tttccatcta caacagcacc agggacttgc tccaggagaa ggcgagccgg agggcggccg |
| 1681 | cctgcgagcg cgagaggagc gacgaagagt actacgccaa ggaggtttac aaaatagaca |
| 1741 | tgccgccctt cttcccctcc gaaactgtct gcccagttgt tacaacaccc tctggctcag |
| 1801 | tgggcagctt gtgctccaga cagtcccagg tgctctgtgg gtaccttgat gccatcccgc |
| 1861 | ccactttcta cagaccctac ttcagaattg ttcgatttga cgtctcagca atggagaaga |
| 1921 | atgcttccaa tttggtgaaa gcagagttca gagtctttcg tttgcagaac ccaaaagcca |
| 1981 | gagtgcctga acaacggatt gagctatatc agattctcaa gtccaaagat ttaacatctc |
| 2041 | caacccagcg ctacatcgac agcaaagttg tgaaaacaag agcagaaggc gaatggctct |
| 2101 | ccttcgatgt aactgatgct gttcatgaat ggcttcacca taaagacagg aacctgggat |
| 2161 | ttaaaataag cttacactgt ccctgctgca cttttgtacc atctaataat tacatcatcc |
| 2221 | caaataaaag tgaagaacta gaagcaagat ttgcaggtat tgatggcacc tccacatata |
| 2281 | ccagtggtga tcagaaaact ataaagtcca ctaggaaaaa aaacagtggg aagaccccac |
| 2341 | atctcctgct aatgttattg ccctcctaca gacttgagtc acaacagacc aaccggcgga |
| 2401 | agaagcgtgc tttggatgcg gcctattgct ttagaaatgt gcaggataat tgctgcctac |
| 2461 | gtccacttta cattgatttc aagagggatc tagggtggaa atggatacac gaacccaaag |
| 2521 | ggtacaatgc caacttctgt gctggagcat gcccgtattt atggagttca gacactcagc |
| 2581 | acagcagggt cctgagctta tataatacca taaatccaga agcatctgct tctccttgct |
| 2641 | gcgtgtccca agatttagaa cctctaacca ttctctacta cattggcaaa acacccaaga |
| 2701 | ttgaacagct ttctaatatg attgtaaagt cttgcaaatg cagctaaaat tcttggaaaa |
| 2761 | gtggcaagac caaaatgaca atgatgatga taatgatgat gacgacgaca acgatgatgc |
| 2821 | ttgtaacaag aaaacataag agagccttgg ttcatcagtg ttaaaaaatt tttgaaaagg |
| 2881 | cggtactagt tcagacactt tggaagtttg tgttctgttt gttaaaactg gcatctgaca |
| 2941 | caaaaaaagt tgaaggcctt attctacatt tcacctactt tgtaagtgag agagacaaga |
| 3001 | agcaaatttt ttttaaagaa aaaaataaac actggaagaa tttattagtg ttaattatgt |
| 3061 | gaacaacgac aacaacaaca acaacaacaa acaggaaaat cccattaagt ggagttgctg |
| 3121 | tacgtaccgt tcctatcccg cgcctcactt gatttttctg tattgctatg caataggcac |
| 3181 | ccttcccatt cttactctta gagttaacag tgagttattt attgtgtgtt actatataat |
| 3241 | gaacgtttca ttgcccttgg aaaataaaac aggtgtataa agtggagacc aaatactttg |
| 3301 | ccagaaactc atggatggct taaggaactt gaactcaaac gagccagaaa aaaagaggtc |
| 3361 | atattaatgg gatgaaaacc caagtgagtt attatatgac cgagaaagtc tgcattaaga |
| 3421 | taaagaccct gaaaacacat gttatgtatc agctgcctaa ggaagcttct tgtaaggtcc |
| 3481 | aaaaactaaa aagactgtta ataaaagaaa ctttcagtca gaataagtct gtaagttttt |
| 3541 | ttttttcttt ttaattgtaa atggttcttt gtcagtttag taaaccagtg aaatgttgaa |
| 3601 | atgttttgac atgtactggt caaacttcag accttaaaat attgctgtat agctatgcta |
| 3661 | taggtttttt cctttgtttt ggtatatgta accataccta tattattaaa atagatggat |
| 3721 | atagaagcca gcataattga aaacacatct gcagatctct tttgcaaact attaaatcaa |
| 3781 | aacattaact actttatgtg taatgtgtaa atttttacca tattttttat attctgtaat |
| 3841 | aatgtcaact atgatttaga ttgacttaaa tttgggctct ttttaatgat cactcacaaa |
| 3901 | tgtatgtttc ttttagctgg ccagtacttt tgagtaaagc ccctatagtt tgacttgcac |
| 3961 | tacaaatgca tttttttttt aataacattt gccctacttg tgctttgtgt ttctttcatt |
| 4021 | attatgacat aagctacctg ggtccacttg tcttttcttt tttttgtttc acagaaaaga |
| 4081 | tgggttcgag ttcagtggtc ttcatcttcc aagcatcatt actaaccaag tcagacgtta |
| 4141 | acaaattttt atgttaggaa aaggaggaat gttatagata catagaaaat tgaagtaaaa |
| 4201 | tgttttcatt ttagcaagga tttagggttc taactaaaac tcagaatctt tattgagtta |
| 4261 | agaaaagttt ctctaccttg gtttaatcaa tatttttgta aaatcctatt gttattacaa |
| 4321 | agaggacact tcataggaaa catctttttc tttagtcagg tttttaatat tcagggggaa |
| 4381 | attgaaagat atatatttta gtcgattttt caaaagggga aaaaagtcca ggtcagcata |
| 4441 | agtcattttg tgtatttcac tgaagttata aggtttttat aaatgttctt tgaaggggaa |
| 4501 | aaggcacaag ccaatttttc ctatgatcaa aaaattcttt ctttcctctg agtgagagtt |
| 4561 | atctatatct gaggctaaag tttaccttgc tttaataaat aatttgccac atcattgcag |
| 4621 | aagaggtatc ctcatgctgg ggttaataga atatgtcagt ttatcacttg tcgcttattt |
| 4681 | agctttaaaa taaaaattaa taggcaaagc aatggaatat ttgcagtttc acctaaagag |
| 4741 | cagcataagg aggcgggaat ccaaagtgaa gttgtttgat atggtctact tcttttttgg |
| 4801 | aatttcctga ccattaatta aagaattgga tttgcaagtt tgaaaactgg aaaagcaaga |
| 4861 | gatgggatgc cataatagta aacagccctt gtgttggatg taacccaatc ccagatttga |
| 4921 | gtgtgtgttg attatttttt tgtcttccac ttttctatta tgtgtaaatc acttttattt |
| 4981 | ctgcagacat tttcctctca gataggatga cattttgttt tgtattattt tgtctttcct |
| 5041 | catgaatgca ctgataatat tttaaatgct ctattttaag atctcttgaa tctgtttttt |
| 5101 | ttttttttaa tttgggggtt ctgtaaggtc tttatttccc ataagtaaat attgccatgg |
| 5161 | gaggggggtg gaggtggcaa ggaaggggtg aagtgctagt atgcaagtgg gcagcaatta |
| 5221 | tttttgtgtt aatcagcagt acaatttgat cgttggcatg gttaaaaaat ggaatataag |
| 5281 | attagctgtt ttgtattttg atgaccaatt acgctgtatt ttaacacgat gtatgtctgt |
| 5341 | ttttgtggtg ctctagtggt aaataaatta tttcgatgat atgtggatgt ctttttccta |
| 5401 | tcagtaccat catcgagtct agaaaacacc tgtgatgcaa taagactatc tcaagctgga |
| 5461 | aaagtcatac cacctttccg attgccctct gtgctttctc ccttaaggac agtcacttca |
| 5521 | gaagtcatgc tttaaagcac aagagtcagg ccatatccat caaggataga agaaatccct |
| 5581 | gtgccgtctt tttattccct tatttattgc tatttggtaa ttgtttgaga tttagtttcc |
| 5641 | atccagcttg actgccgacc agaaaaaatg cagagagatg tttgcaccat gctttggctt |
| 5701 | tctggttcta tgttctgcca acgccagggc caaaagaact ggtctagaca gtatcccctg |
| 5761 | tagccccata acttggatag ttgctgagcc agccagatat aacaagagcc acgtgctttc |
| 5821 | tggggttggt tgtttgggat cagctacttg cctgtcagtt tcactggtac cactgcacca |
| 5881 | caaacaaaaa aacccaccct atttcctcca atttttttgg ctgctaccta caagaccaga |
| 5941 | ctcctcaaac gagttgccaa tctcttaata aataggatta ataaaaaaag taattgtgac |
| 6001 | tcaaaaaaaa aaaaaa |

[0283] An exemplary human WNT3 amino acid sequence is set forth below (SEQ ID NO: 47; GenBank Accession No: BAB70502.1, Version 1, incorporated herein by reference):

| | |
|---|---|
| 1 | mephllglll glllggtrvl agypiwwsla lgqqytslgs qpllcgsipg lvpkqlrfcr |
| 61 | nyieimpsva egvklgiqec qhqfrgrrwn cttiddslai fgpvldkatr esafvhaias |
| 121 | agvafavtrs caegtsticg cdshhkgppg egwkwggcse dadfgvlvsr efadarenrp |
| 181 | darsamnkhn neagrttild hmhlkckchg lsgscevktc wwaqpdfrai gdflkdkyds |
| 241 | asemvvekhr esrgwvetlr akyslfkppt erdlvyyens pnfcepnpet gsfgtrdrtc |
| 301 | nvtshgidgc dllccgrghn trtekrkekc hcifhwccyv scqeciriyd vhtck |

[0284] An exemplary human WNT3 nucleic acid sequence is set forth below (SEQ ID NO: 48; GenBank Accession No: NM_030753.4, Version 4, incorporated herein by reference):

| | |
|---|---|
| 1 | tgctccgcgc tgggctcggg aggggggcgg ctgcgggtgg aggtgcgctt ctgacaagcc |
| 61 | cgaaagtcat ttccaatctc aagtggactt tgttccaact attgggggcg tcgctccccc |
| 121 | tcttcatggt cgcgggcaaa cttcctcctc ggcgcctctt ctaatggagc cccacctgct |
| 181 | cgggctgctc ctcggcctcc tgctcggtgg caccagggtc ctcgctggct acccaatttg |
| 241 | gtggtccctg gccctgggcc agcagtacac atctctgggc tcacagcccc tgctctgcgg |
| 301 | ctccatccca ggcctggtcc ccaagcaact gcgcttctgc cgcaattaca tcgagatcat |
| 361 | gcccagcgtg gccgagggcg tgaagctggg catccaggag tgccagcacc agttccgggg |
| 421 | ccgccgctgg aactgcacca ccatagatga cagcctggcc atctttgggc ccgtcctcga |
| 481 | caaagccacc cgcgagtcgg ccttcgttca cgccatcgcc tcggccggcg tggccttcgc |
| 541 | cgtcacccgc tcctgcgccg agggcacctc caccatttgc ggctgtgact cgcatcataa |
| 601 | ggggccgcct ggcgaaggct ggaagtgggg cggctgcagc gaggacgctg acttcggcgt |
| 661 | gttagtgtcc agggagttcg cggatgcgcg cgagaacagg ccggacgcgc gctcggccat |
| 721 | gaacaagcac aacaacgagg cgggccgcac gactatcctg gaccacatgc acctcaaatg |
| 781 | caagtgccac gggctgtcgg gcagctgtga ggtgaagacc tgctggtggg cgcagcctga |
| 841 | cttccgtgcc atcggtgact tcctcaagga caagtatgac agcgcctcgg agatggtagt |
| 901 | agagaagcac cgtgagtccc gaggctgggt ggagaccctc cgggccaagt actcgctctt |
| 961 | caagccaccc acggagaggg acctggtcta ctacgagaac tcccccaact tttgtgagcc |
| 1021 | caacccagag acgggttcct ttggcacaag ggaccggact tgcaatgtca cctcccacgg |
| 1081 | catcgatggc tgcgatctgc tctgctgtgg ccggggccac aacacgagga cggagaagcg |
| 1141 | gaaggaaaaa tgccactgca tcttccactg gtgctgctac gtcagctgcc aggagtgtat |
| 1201 | tcgcatctac gacgtgcaca cctgcaagta gggcaccagg gcgctgggaa ggggtgaagt |
| 1261 | gtgtggctgg gcggattcag cgaagtctca tgggaagcag gacctagagc cgggcacagc |
| 1321 | cctcagcgtc agacagcaag gaactgtcac cagccgcacg cgtggtaaat gacccagacc |
| 1381 | caactcgcct gtggacgggg aggctctccc tctctctcat cttacatttc tcaccctact |
| 1441 | ctggatggtg tgtggttttt aaagaagggg gctttctttt tagttctcta gggtctgata |
| 1501 | ggaacagacc tgaggcttat ctttgcacat gttaaagaaa ataaaaatga aaaaaaattt |
| 1561 | gactccaaca gaacaggctg ggctaatgtg agctctcagc ctggcagtca agacatcagc |
| 1621 | atgggcaagg ttctgtttcc aaactgctgc ttctggtgac attccaagac gcctggaggg |
| 1681 | tgggagtcag gaagtaggac acacccctgc agtctccttt tcttggtcca ctcccattca |
| 1741 | aatttgagct aatttctcat tctgataaaa gccataggtt tagctaggat gaagtggtag |
| 1801 | gaaggtccgt ggcagttgtt agagtaggat ttggagtttg gaagaactgg cagctcaggg |
| 1861 | tggcctggtc agccgtttga agagcagcca tgtgttcttc tcagtctcat tttctctata |
| 1921 | accctgttct gcacgagggg cagtcagatc tcaaaatctt tttctaccat tctgcagttt |
| 1981 | ccaccgtcaa tgcagttttt tttttgtttt tttgtttttt tttttttttg gtggtagtgg |
| 2041 | accttgtaaa taggctatgt aagggggcaa gtcttctcta gctcaaatgg cttcctaaat |
| 2101 | aaataagcgg tatcttcaga aggggccatt cagtccttcc cagccctgct cacctgcaga |
| 2161 | ttctctgtac aaataactcc aggtagagca gttggactcc aggtcacctt agtataagtt |
| 2221 | agacaaaggg tccgtgaggg agtagccatc aattcctgaa attccaactt tgtgactagc |
| 2281 | agatggggag gatgaaaacc atccctttgc ttcctctcca atacggaccc atcttactgt |
| 2341 | gtcctttcct ctctggggcc aatgtgagta aacacagaca cagagttctt tcccccagct |
| 2401 | cttcctccct cacctgcatg ctgagatagc ttccatccat gcagttccca aggatctgga |
| 2461 | ttagaagttc aaaggggaac cagcagtcac ctactccctt aggtgaagca tctcacggct |
| 2521 | gagttctccc tgaggcatac tggtccagct gagcgtccta gagaaagcta gcaaaaggga |
| 2581 | ggcacatgga tttcacagta tgaattggtt caacaactgt cttagggaga atcagaaaga |
| 2641 | agagatgcag caggggaatg agcagaacaa agatttttct ttctccccct tctctctggg |
| 2701 | gtctacctaa ccctgaccta aaataccagg gcagcgatct cccagctggt gcaggtgggc |
| 2761 | ttgccaagat ggtcgtccag gagcccgcct tcacttctaa atctgctggc cacaagccct |
| 2821 | gctaaagata cacatctcac cccctccgcc aagtctgaaa tgcccctccc catctcacct |
| 2881 | tagactgaaa agttttaaat catgtcaact ggataatact tgctttatgt gagaatactt |
| 2941 | cagcagaatg gatacgaatt ttcaaaacaa tcttttcata tctatgtatt ctatattaaa |
| 3001 | agtgataaag tcatgtttct ggggcgtatt caagtagctg acaagtaatt atttaataat |
| 3061 | agtacatgag tgcattgtaa tgattctcgc cgtagtcagg taatagtatc caaccgaaat |
| 3121 | ttcctaccaa cctgctgtat ccaaagtttt gtaaaaagtt gtagaagttg ttgatctttt |
| 3181 | tgattttata ttcaaaaagt ctctttttat aaatattatt tattatacaa tgtatatacc |
| 3241 | tttgagttaa ctaagattat atattatata aatatatata tatttggaga aaatatattt |
| 3301 | catcatgcag tttttttctg ttaagtcatt aaagagaagg taaacaaacc taaaaaaaaa |
| 3361 | aaaaaaaaaa aaaaaaaaaa aaaaa |

[0285] An exemplary human HOXD13 amino acid sequence is set forth below (SEQ ID NO: 49; GenBank Accession No: AAC51635.1, Version 1, incorporated herein by reference):

| | |
|---|---|
| 1 | mdglradggg aggapassss ssvaaaaasg qcrgflsapv fagthsgraa aaaaaaaaaa |
| 61 | aaasgfaypg tsertgssss ssssavvaar peappakecp aptpaaaaaa ppsapalgyg |
| 121 | yhfgngyysc rmshgvglqq nalkssphas lggfpvekym dvsglasssv panevparak |
| 181 | evsfyqgyts pyqhvpgyid mvstfgsgep rheayismeg yqswtlangw nsqvyctkdq |
| 241 | pqgshfwkss fpgdvalnqp dmcvyrrgrk krvpytklql keleneyain kfinkdkrrr |
| 301 | isaatnlser qvtiwfqnrr vkdkkivskl kdtvs |

[0286] An exemplary human HOXD13 nucleic acid sequence is set forth below (SEQ ID NO: 50; GenBank Accession No: NM_000523.3, Version 3, incorporated herein by reference):

| | |
|---|---|
| 1 | gagaaaggag aggagggagg aggcgcgccg cgccatggtg tcctgcgcgg ggccagggcc |
| 61 | agggccgggg ccgggccagg ccgggccatg agccgcgccg ggagctggga catggacggg |
| 121 | ctgcgggcag acggcggggg cgccggtggc gccccggcct cttcctcctc ctcatcggtg |
| 181 | gcggcggcgg cggcgtcagg ccagtgccgc ggctttctct ccgcgcctgt gttcgccggg |
| 241 | acgcattcgg ggcgggcggc ggcggcggca gcggcggctg cggcggcggc ggcggcagcc |
| 301 | tccggctttg cgtaccccgg gacctctgag cgcacgggct cttcctcgtc gtcgtcctct |
| 361 | tctgccgttg tagcggcgcg cccggaggct cccccagcca aagagtgccc agcacccacg |
| 421 | cctgcagcgg ccgctgcagc gcccccgagc gctccagcgc tgggctacgg ctaccacttc |
| 481 | ggcaacggct actacagctg ccgtatgtcg cacggcgtgg gcttacagca gaatgcgctc |
| 541 | aagtcatcgc cgcacgcctc gctgggaggc tttcccgtgg agaagtacat ggacgtgtca |
| 601 | ggcctggcga gcagcagcgt accggccaac gaggtgccag cgcgagccaa ggaggtatcc |
| 661 | ttctaccagg gctatacgag cccttaccag cacgtgcccg gctatatcga catggtgtcc |
| 721 | actttcggct ccggggagcc tcggcacgag gcctacatct ccatggaggg gtaccagtcc |
| 781 | tggacgctgg ctaacgggtg gaacagccag gtgtactgca ccaaggacca gccacagggg |
| 841 | tcccactttt ggaaatcttc ctttccaggg gatgtggctc taaatcagcc ggacatgtgc |
| 901 | gtctaccgaa gagggaggaa gaagagagtg ccttacacca aactgcagct taaagaactg |
| 961 | gagaacgagt atgccattaa caaattcatt aacaaggaca agcggcggcg tatctcggct |
| 1021 | gctacgaacc tatctgagag acaagtgacc atttggtttc agaaccgaag agtgaaggac |
| 1081 | aagaaaattg tctccaagct caaagatact gtctcctgat gtggtccagg ttggccacag |
| 1141 | acagcttaga agccattcgg ttgtctccaa aaggcctttg gaaagacttg aatatgtatt |
| 1201 | taattccccc caccccctgc caatggtggc aaattttgtg aattgttttt ctctcttccc |
| 1261 | cttatctggc tctaaaacct tctgctgccc aacctgactt tgtagttctg atttttactt |
| 1321 | gtttattatt ggttttgttc ttgcctaggg tttttaaaat atctgttttt aatgttttgt |
| 1381 | ttctccctcc aggccagtat aaagggactt gaagtatttt ttaataatcc gccccccaat |
| 1441 | gaacttcaga agtgccattc tgatttaagg gtttttttaa aaaattactt tatttgttca |
| 1501 | ttcccagcac tgattatctt cataatccat taggacagaa tggttttcag tcgttcatat |
| 1561 | cctgtaatta ggtaattgaa tcattagctc tcagcagttg ccctgaggca agtggaaagg |
| 1621 | caggcagtgc tctggggtca ccgagaaagt ctaaaaacag gaggctgaag gtactgtgat |
| 1681 | ggctttaaaa atggccacct tattaaatag ggattgtatc aatattgaaa tgaagacaat |
| 1741 | ctttccaact ttgggtgttt cacttgctgt tttaattgtt tgtttttaac actttgtagg |
| 1801 | tttgtgtttt cataatcttt aatttgaaac tcatgtgtcc tcatggatcg tggatgcctt |
| 1861 | catttcttga gctctcaatg cagacattta aatggctgca atcagtagag tgacccgcgg |
| 1921 | atggcataaa tgcacctcct tttcttggcc ttggatctat gggtctggga ttgtggtcat |
| 1981 | ctcctcaatc ctcaaaaaga ggctgaatca atgtggccgt gggtgggaac ttacatacag |
| 2041 | aacccaatga agaacttgac tgtctaaaca agggggcctc gcatggagct gtaaagcatc |
| 2101 | taacaaatat gaaaaatgtg aagttccaag gtccaagaag aaaaataatg atgtttctga |
| 2161 | aagtgatgat aaataattac ttttaaagtg ctgcatattt atacaattga gagattattt |
| 2221 | ttgtaaatgc aatgtctgtg agctgggata catgggcagt gcttcagaca tttaaaaatc |
| 2281 | actttttact cctagggaga tgccaataaa cagaactctt ttgtttcaaa aaaaaaaaaa |
| 2341 | a |

[0287] An exemplary human HOXD11 amino acid sequence is set forth below (SEQ ID NO: 51; GenBank Accession No: AAI09395.1, Version 1, incorporated herein by reference):

| | |
|---|---|
| 1 | mylpgcayyv apsdfaskps flsqpsscqm tfpyssnler gggspctkat pgsepkgaae |
| 61 | gsggdgegpp geagaeksss avapqrsrkk rcpytkyqir elerefffnv yinkekrlql |
| 121 | srmlnltdrq vkiwfqnrrm kekklnrdrl qyftgnplf |

[0288] An exemplary human HOXD11 nucleic acid sequence is set forth below (SEQ ID NO: 52; GenBank Accession No: NM_021192.2, Version 2, incorporated herein by reference):

| | |
|---|---|
| 1 | atgaacgact ttgacgagtg cggccagagc gcagccagca tgtacctgcc gggctgcgcc |
| 61 | tactatgtgg ccccgtctga cttcgctagc aagccttcgt tcctttccca accgtcgtcc |
| 121 | tgccagatga ctttccccta ctcttccaac ctggctccgc acgtccagcc cgtgcgcgaa |
| 181 | gtggccttcc gcgactacgg cctggagcgc gccaagtggc cgtaccgcgg cggcggcggc |
| 241 | ggcggcagcg cggggggcgg cagcagcggg ggcggccccg gcgggggcgg cggcggcgcg |
| 301 | gggggctacg ctccctacta cgcggcggcg gcggcggcgg ctgcggcggc cgcggcggcc |
| 361 | gaggaggcgg ccatgcaacg cgagcttctc ccgcccgcgg gccgccggcc ggacgtgctc |
| 421 | ttcaaggcgc ctgagccggt gtgcgctgcg ccggggccgc cgcacggccc cgcgggcgcc |
| 481 | gcctccaact tctacagcgc ggtgggccgc aatggcatct tgccacaggg cttcgaccag |
| 541 | ttctacgagg cagcgcccgg gcccccgttc gccgggccgc agcccccgcc gccacccgcg |
| 601 | ccgccacagc ccgagggcgc agccgacaag ggcgacccca ggaccggggc tggtggcggc |
| 661 | gggggcagtc cctgcaccaa ggcgacccct ggctcggagc ccaagggggc agcagaaggc |
| 721 | agcggtggcg acggcgaggg ccccccggga gaggcggggg ccgagaagag cagcagcgca |
| 781 | gttgcccccc agcggtcccg gaaaaagcgc tgtccctata ccaagtacca gatccgcgaa |
| 841 | ctggaacgcg agtttttctt taacgtgtac ataaacaaag agaaaagact tcaactctct |
| 901 | cggatgctca acctcactga ccggcaagtc aaaatctggt tccagaatcg caggatgaaa |
| 961 | gaaaagaaac tgaacagaga ccgtctgcag tatttcactg gaaacccctt attttgagag |
| 1021 | ctccaggaag cgccctcacc ccagccccac tcacccaccc tccttcccac cagcctgctc |
| 1081 | tccgcaggcc cactgtcctt gggtttaatg acgtctcttc tctgtggaac ttcacgattc |
| 1141 | cttcccacgg tcaactcggg acctcccagc gaccactgca gcctgcggac gaggccggga |
| 1201 | cttggccgag cggatcctaa taaggggaaa atggtaaatg caaacgtccc gttacaattt |
| 1261 | taccgccagt gtgctgtcgt tccccctccc cctctccgag tcctcgtggg gacacggcgg |
| 1321 | ggtctgtagg aagttgggcc gggttggggg ttgctagaag gcgctggtgt tttgctctga |
| 1381 | gttttaagag atcccttcct tcctcttcgg tgaatgcagg ttatttaaac tttgggaaat |
| 1441 | gtacttttag tctgtcatat caa |

[0289] An exemplary human HOXA2 nucleic acid sequence is set forth below (SEQ ID NO: 53; GenBank Accession No: NM_006726.1, Version 1, incorporated herein by reference):

| | |
|---|---|
| 1 | mnyefereig finsqpslae cltsfppvad tfqsssikts tlshstlipp pfeqtipsln |
| 61 | pgshprhgag grpkpspags rgspvpagal qppeypwmke kkaakktall paaaaaataa |
| 121 | atgpaclshk esleiadgsg ggsrrlrtay tntqllelek efhfnkylcr prrveiaall |
| 181 | dlterqvkvw fqnrrmkhkr qtqckenqns egkcksleds ekveedeeek tlfeqalsvs |
| 241 | galleregyt fqgnalsqqq apnghngdsq sfpvspltsn eknlkhfqhq sptvpnclst |
| 301 | mgqncgagln ndspealevp slqdfsvfst dsclqlsdav spslpgslds pvdisadsld |
| 361 | fftdtlttid lqhlny |

[0290] An exemplary human HOXA2 nucleic acid sequence is set forth below (SEQ ID NO: 54; GenBank Accession No: NM_006735.3, Version 3, incorporated herein by reference):

| | |
|---|---|
| 1 | tcttttgatt aaagcccaaa ttgtcattgg gcagaagcaa tcatgtgaca gccaattcgg |
| 61 | tccaatttca accttgtctc catgaattca atagtttaat agtagcgcgg tccccatacg |
| 121 | gctgtaatca gtgaattaga aaaaaaacac cctagcagcg atattctatg atagattttt |
| 181 | tttcctctgc gctcgccttt ttcctaggcc ttgccccccc aaagcccctc caaaagaggg |
| 241 | aactttttct ctgagggggc tccaaggaga aggccatgaa ttacgaattt gagcgagaga |
| 301 | ttggttttat caatagccag ccgtcgctcg ctgagtgcct gacatctttt ccccctgtcg |
| 361 | ctgatacatt tcaaagttca tcaatcaaga cctcgacgct ttcacactcg acactgattc |
| 421 | ctcctccttt tgagcagacc attcccagcc tgaaccccgg cagtcaccct cgccacggcg |
| 481 | ctggcggccg ccccaagccg agccccgcgg gcagccgcgg cagcccggtg cccgccggcg |
| 541 | ccctgcagcc gcccgagtac ccctggatga aggagaagaa ggcggccaag aaaaccgcac |
| 601 | ttctgccggc cgccgccgcc gccgccaccg ccgcagccac cggccctgct tgcctcagcc |
| 661 | acaaagaatc cctggaaatc gccgatggca gcggcggggg atcgcggcgc ctgagaactg |
| 721 | cttacaccaa cacacagctt ctagagctgg aaaaagaatt tcatttcaac aagtaccttt |
| 781 | gcagaccccg aagggtggag attgcagcgc tgctggattt gactgagaga caagtgaaag |
| 841 | tgtggtttca gaaccggagg atgaagcaca agaggcagac ccagtgcaag gaaaaccaaa |
| 901 | acagcgaagg gaaatgtaaa agccttgagg actccgagaa agtagaggag gacgaggaag |
| 961 | agaagacgct ctttgagcaa gcccttagcg tctctggggc ccttctggag agggaaggct |
| 1021 | acacttttca gcaaaatgcc ctctctcagc agcaggctcc caatggacac aatggcgact |
| 1081 | cccaaagttt cccagtctcg cctttaacca gcaatgagaa aaatctgaaa cattttcagc |
| 1141 | accagtcacc cactgttccc aactgcttgt caacaatggg ccagaactgt ggagctggcc |
| 1201 | taaacaatga cagtcctgag gcccttgagg tcccctcttt gcaggacttt agcgttttct |
| 1261 | ccacagattc ctgcctgcag ctttcagatg cagtttcacc cagtttgcca ggttccctcg |
| 1321 | acagtcccgt agatatttca gctgacagct tagacttttt tacagacaca ctcaccacaa |
| 1381 | tcgacttgca gcatctgaat tactaaaaac attaaagcaa aacaaagcat caccaaacaa |
| 1441 | aaactccttt gaccaggtgg ttttgccttc ttttatttgg gagtttattt tttattttct |
| 1501 | tcttgaccta ccccttccct cctttaagtg ttgaggattt tctgtttagt gattccctga |
| 1561 | cccagtttca aacagagcca tcttttacag attattttgg agttttagtt gttttaaacc |
| 1621 | taactcaaca accctttatg tgattcctga gagcagtatg aggcctgcaa gaaagtgatc |
| 1681 | atataattgt atcttcactt tctttttatt tttgtattac attgggatgc attgtcatgc |
| 1741 | atattttttg tagaataaat tctcctttgc tataagtaaa aaaaaaaaaa a |

[0291] An exemplary human HOXA5 amino acid sequence is set forth below (SEQ ID NO: 55; GenBank Accession No: P20719.2, Version 2, incorporated herein by reference):

| | |
|---|---|
| 1 | mssyfvnsfc grypngpdyq lhnygdhssv seqfrdsasm hsgrygygyn gmdlsvgrsg |
| 61 | sghfgsgera rsyaasasaa paeprysqpa tsthspqpdp lpcsavapsp gsdshhggkn |
| 121 | slsnssgasa dagsthissr egvgtasgae edapasseqa saqsepspap paqpqiypwm |
| 181 | rklhishdni ggpegkrart aytryqtlel ekefhfnryl trrrrieiah alclserqik |
| 241 | iwfqnrrmkw kkdnklksms maaaggafrp |

[0292] An exemplary human HOXA5 nucleic acid sequence is set forth below (SEQ ID NO: 56; GenBank Accession No: NM_019102.3, Version 3, incorporated herein by reference):

| | |
|---|---|
| 1 | gggtgctata gacgcacaaa cgaccgcgag ccacaaatca agcacacata tcaaaaaaca |
| 61 | aatgagctct tattttgtaa actcattttg cggtcgctat ccaaatggcc cggactacca |
| 121 | gttgcataat tatggagatc atagttccgt gagcgagcaa ttcagggact cggcgagcat |
| 181 | gcactccggc aggtacggct acggctacaa tggcatggat ctcagcgtcg gccgctcggg |
| 241 | ctccggccac tttggctccg gagagcgcgc ccgcagctac gctgccagcg ccagcgcggc |
| 301 | gcccgccgag cccaggtaca gccagccggc cacgtccacg cactctcctc agcccgatcc |
| 361 | gctgccctgc tccgccgtgg ccccctcgcc cggcagcgac agccaccacg gcgggaaaaa |
| 421 | ctccctaagc aactccagcg gcgcctcggc cgacgccggc agcacccaca tcagcagcag |
| 481 | agagggggtt ggcacggcgt ccggagccga ggaggacgcc cctgccagca gcgagcaggc |
| 541 | gagtgcgcag agcgagccga gcccggcgcc gcccgcccaa ccccagatct acccctggat |
| 601 | gcgcaagctg cacataagtc atgacaacat aggcggcccg gaaggcaaaa gggcccggac |
| 661 | ggcctacacg cgctaccaga ccctggagct ggagaaggag ttccacttca accgttacct |
| 721 | gacccgcaga aggaggattg aaatagcaca tgctctttgc ctctccgaga gacaaattaa |
| 781 | aatctggttc caaaaccgga gaatgaagtg gaaaaaagat aataagctga aaagcatgag |
| 841 | catggccgcg gcaggagggg ccttccgtcc ctgagtatct gagcgtttaa agtactgagc |
| 901 | agtattagcg gatcccgcgt agtgtcagta ctaaggtgac tttctgaaac tcccttgtgt |
| 961 | tccttctgtg aagaagccct gttctcgttg ccctaattca tcttttaatc atgagcctgt |
| 1021 | ttattgccat tatagcgcct gtataagtag atctgctttc tgttcatctc tttgtcctga |
| 1081 | atggctttgt cttgaaaaaa aatagatgtt ttaacttatt tatatgaagc aagctgtgtt |
| 1141 | acttgaagta actataacaa aaaaagaaaa gagaaaaaaa aacacacaaa aagtccccct |
| 1201 | tcaatctcgt ttagtgccaa tgttgtgtgt tgcactcaag ttgtttaact gtgcatgtgc |
| 1261 | gtggaagtgt tcctgtctca atagctccaa gctgttaaag atatttttat tcaaactacc |
| 1321 | tatattcctt gtgtaattaa tgctgttgta gaggtgactt gatgagacac aacttgttcg |
| 1381 | acgtgtagtg actagtgact ctgtgatgaa aactgtgact ccaagcggtg tgtccctgcg |
| 1441 | tgcctttata ggaccctttg cacgaactct ggaagtggct cttataagcg cagcttcagt |
| 1501 | gatgtatgtt tttgtgaaca aagttacaaa tattgtccaa gtctggctgt tttaagcaaa |
| 1561 | ctgtgatcag cttttttttt tttttttttt tttttgtatt tgtttttaag gaaaaaatac |
| 1621 | tgactggaac aaaaaataaa ctttctattg taagttc |

[0293] An exemplary human HOXD10 amino acid sequence is set forth below (SEQ ID NO: 57; GenBank Accession No: P28358.2, Version 2, incorporated herein by reference):

| | |
|---|---|
| 1 | msfpnsspaa ntflvdslis acrsdsfyss sasmymppps admgtygmqt cgllpslakr |
| 61 | evnhqnmgmn vhpyipqvds wtdpnrscri eqpvtqqvpt csfttnikee snccmysdkr |
| 121 | nklisaevps yqrlvpescp venpevpvpg yfrlsqtyat gktqeynnsp egsstvmlql |
| 181 | nprgaakpql saaqlqmekk mnepvsgqep tkvsqvespe akgglpeers claevsvssp |
| 241 | evqekeskee iksdtptsnw ltaksgrkkr cpytkhqtle lekeflfnmy ltrerrleis |
| 301 | ksvnltdrqv kiwfqnrrmk lkkmsrenri reltanltfs |

[0294] An exemplary human HOXD10 nucleic acid sequence is set forth below (SEQ ID NO: 58; GenBank Accession No: NM_002148.3, Version 3, incorporated herein by reference):

| | |
|---|---|
| 1 | cggggaatgt tttcctagag atgtcagcct acaaaggaca caatctctct tcttcaaatt |
| 61 | cttccccaaa atgtcctttc ccaacagctc tcctgctgct aatacttttt tagtagattc |
| 121 | cttgatcagt gcctgcagga gtgacagttt ttattccagc agcgccagca tgtacatgcc |
| 181 | accacctagc gcagacatgg ggacctatgg aatgcaaacc tgtggactgc tcccgtctct |
| 241 | ggccaaaaga gaagtgaacc accaaaatat gggtatgaat gtgcatcctt atatacctca |
| 301 | agtagacagt tggacagatc cgaacagatc ttgtcgaata gagcaacctg ttacacagca |
| 361 | agtccccact tgctccttca ccaccaacat taaggaagaa tccaattgct gcatgtattc |
| 421 | tgataagcgc aacaaactca tttcggccga ggtcccttcg taccagaggc tggtccctga |
| 481 | gtcttgtccc gttgagaacc ctgaggttcc cgtccctgga tattttagac tgagtcagac |
| 541 | ctacgccacc gggaaaaccc aagagtacaa taatagcccc gaaggcagct ccactgtcat |
| 601 | gctccagctc aaccctcgtg gcgcggccaa gccgcagctc tccgctgccc agctgcagat |
| 661 | ggaaaagaag atgaacgagc ccgtgagcgg ccaggagccc accaaagtct cccaggtgga |
| 721 | gagccccgag gccaaaggcg gccttcccga agagaggagc tgcctggctg aggtctccgt |
| 781 | gtccagtccc gaagtgcagg agaaggaaag caaagaggaa atcaagtctg atacaccaac |
| 841 | cagcaattgg ctcactgcaa agagtggcag aaagaagagg tgcccttaca ctaagcacca |
| 901 | aacgctggaa ttagaaaaag agttcttgtt caatatgtac ctcacccgcg agcgccgcct |
| 961 | agagatcagt aagagcgtta acctcaccga caggcaggtc aagatttggt ttcaaaaccg |
| 1021 | ccgaatgaaa ctcaagaaga tgagccgaga gaaccggatc cgagaactga ccgccaacct |
| 1081 | cacgttttct taggtctgag gccggtctga ggccggtcag aggccaggat tggagagggg |
| 1141 | gcaccgcgtt ccagggccca gtgctggagg actgggaaag cggaaacaaa accttcaccg |
| 1201 | ctctttgttt gttgttttgt tgtattttgt tttcctgcta gaatgtgact ttggggtcat |
| 1261 | tatgttcgtg ctgcaagtga tctgtaatcc ctatgagtat atatatatat atatatatat |
| 1321 | atatataaaa acttagcacg tgtaatttat tattttttca tcgtaatgca gggtaactat |
| 1381 | tattgcgcat tttcatttgg gtcttaactt attggaactg tagagcatcc atccatccat |
| 1441 | ccatccagca atgtgacttt ttcatgtctt tcctaacaca aaaggtctat gtgtgtggtt |
| 1501 | agtccatgaa ctcatggcat tttgaataca tccagtactt taaaaatgac atatatattt |
| 1561 | aaaaaaaaaa gattaagaaa acccacaagt tggagggagg gggacttaaa aagcacatta |
| 1621 | caatgtatct tttcacaaat gaatttagca gttgtccttg gtgagatggg atattggcga |
| 1681 | tttatgcctt gtagcctttc ccttgtggtg catctgtggt ttggtagaag tacaacagca |
| 1741 | acctgtcctt tctgtgcatg ttctggtcgc atgtataatg caataaactc tggaaatgag |
| 1801 | ttcaaaaaaa aaaa |

[0295] An exemplary human ANGPT1 amino acid sequence is set forth below (SEQ ID NO: 59; GenBank Accession No: AAI52420.1, Version 1, incorporated herein by reference):

| | |
|---|---|
| 1 | mtvflsfafl aailthigcs nqrrspensg rrynriqhgq caytfilpeh dgncresttd |
| 61 | qyntnalqrd aphvepdfss qklqhlehvm enytqwlqkl enyivenmks emaqiqqnav |
| 121 | qnhtatmlei gtsllsqtae qtrkltdvet qvlnqtsrle iqllenslst yklekqllqq |
| 181 | tneilkihek nsllehkile megkhkeeld tlkeekenlq glvtrqtyii qelekqlnra |
| 241 | ttnnsvlqkq qlelmdtvhn lvnlctkegv llkggkreee kpfrdcadvy qagfnksgiy |
| 301 | tiyinnmpep kkvfcnmdvn gggwtviqhr edgsldfqrg wkeykmgfgn psgeywlgne |
| 361 | fifaitsqrq ymlrielmdw egnraysqyd rfhignekqn yrlylkghtg tagkqsslil |
| 421 | hgadfstkda dndncmckca lmltggwwfd acgpsnlngm fytagqnhgk lngikwhyfk |
| 481 | gpsyslrstt mmirpldf |

[0296] An exemplary human ANGPT1 nucleic acid sequence is set forth below (SEQ ID NO: 60; GenBank Accession No: NM_001146.4, Version 4, incorporated herein by reference):

| | |
|---|---|
| 1 | gccctaagcc atcagcaatc cttagtatag gggcacactc atgcattcct gtcaagtcat |
| 61 | cttgtgaaag gctgcctgct tccagcttgg cttggatgtg caaccttaat aaaactcact |
| 121 | gaggtctggg agaaaatagc agatctgcag cagatagggt agaggaaagg gtctagaata |
| 181 | tgtacacgca gctgactcag gcaggctcca tgctgaacgg tcacacagag aggaaacaat |
| 241 | aaatctcagc tactatgcaa taaatatctc aagttttaac gaagaaaaac atcattgcag |
| 301 | tgaaataaaa aattttaaaa ttttagaaca aagctaacaa atggctagtt ttctatgatt |
| 361 | cttcttcaaa cgctttcttt gagggggaaa gagtcaaaca aacaagcagt tttacctgaa |
| 421 | ataaagaact agttttagag gtcagaagaa aggagcaagt tttgcgagag gcacggaagg |
| 481 | agtgtgctgg cagtacaatg acagttttcc tttcctttgc tttcctcgct gccattctga |
| 541 | ctcacatagg gtgcagcaat cagcgccgaa gtccagaaaa cagtgggaga agatataacc |
| 601 | ggattcaaca tgggcaatgt gcctacactt tcattcttcc agaacacgat ggcaactgtc |
| 661 | gtgagagtac gacagaccag tacaacacaa acgctctgca gagagatgct ccacacgtgg |
| 721 | aaccggattt ctcttcccag aaacttcaac atctggaaca tgtgatggaa aattatactc |
| 781 | agtggctgca aaaacttgag aattacattg tggaaaacat gaagtcggag atggcccaga |
| 841 | tacagcagaa tgcagttcag aaccacacgg ctaccatgct ggagatagga accagcctcc |
| 901 | tctctcagac tgcagagcag accagaaagc tgacagatgt tgagacccag gtactaaatc |
| 961 | aaacttctcg acttgagata cagctgctgg agaattcatt atccacctac aagctagaga |
| 1021 | agcaacttct tcaacagaca aatgaaatct tgaagatcca tgaaaaaaac agtttattag |
| 1081 | aacataaaat cttagaaatg gaaggaaaac acaaggaaga gttggacacc ttaaaggaag |
| 1141 | agaaagagaa ccttcaaggc ttggttactc gtcaaacata tataatccag gagctggaaa |
| 1201 | agcaattaaa cagagctacc accaacaaca gtgtccttca gaagcagcaa ctggagctga |
| 1261 | tggacacagt ccacaacctt gtcaatcttt gcactaaaga aggtgtttta ctaaagggag |
| 1321 | gaaaaagaga ggaagagaaa ccatttagag actgtgcaga tgtatatcaa gctggtttta |
| 1381 | ataaaagtgg aatctacact atttatatta ataatatgcc agaacccaaa aaggtgtttt |
| 1441 | gcaatatgga tgtcaatggg ggaggttgga ctgtaataca acatcgtgaa gatggaagtc |
| 1501 | tagatttcca aagaggctgg aaggaatata aaatgggttt tggaaatccc tccggtgaat |
| 1561 | attggctggg gaatgagttt atttttgcca ttaccagtca gaggcagtac atgctaagaa |
| 1621 | ttgagttaat ggactgggaa gggaaccgag cctattcaca gtatgacaga ttccacatag |
| 1681 | gaaatgaaaa gcaaaactat aggttgtatt taaaaggtca cactgggaca gcaggaaaac |
| 1741 | agagcagcct gatcttacac ggtgctgatt tcagcactaa agatgctgat aatgacaact |
| 1801 | gtatgtgcaa atgtgccctc atgttaacag gaggatggtg gtttgatgct tgtggcccct |
| 1861 | ccaatctaaa tggaatgttc tatactgcgg gacaaaacca tggaaaactg aatgggataa |
| 1921 | agtggcacta cttcaaaggg cccagttact ccttacgttc cacaactatg atgattcgac |
| 1981 | ctttagattt ttgaaagcgc aatgtcagaa gcgattatga aagcaacaaa gaaatccgga |
| 2041 | gaagctgcca ggtgagaaac tgtttgaaaa cttcagaagc aaacaatatt gtctcccttc |
| 2101 | cagcaataag tggtagttat gtgaagtcac caaggttctt gaccgtgaat ctggagccgt |
| 2161 | ttgagttcac aagagtctct acttggggtg acagtgctca cgtggctcga ctatagaaaa |
| 2221 | ctccactgac tgtcgggctt taaaaaggga agaaactgct gagcttgctg tgcttcaaac |
| 2281 | tactactgga ccttattttg gaactatggt agccagatga taaatatggt taatttcatg |
| 2341 | taaaacagaa aaaaagagtg aaaaagagaa tatacatgaa gaatagaaac aagcctgcca |
| 2401 | taatcctttg gaaaagatgt attataccag tgaaaaggtg ttatatctat gcaaacctac |
| 2461 | taacaaatta tactgttgca caattttgat aaaaatttag aacagcattg tcctctgagt |
| 2521 | tggttaaatg ttaatggatt tcagaagcct aattccagta tcatacttac tagttgattt |
| 2581 | ctgcttaccc atcttcaaat gaaaattcca tttttgtaag ccataatgaa ctgtagtaca |
| 2641 | tggacaataa gtgtgtggta gaaacaaact ccattactct gatttttgat acagttttca |
| 2701 | gaaaaagaaa tgaacataat caagtaagga tgtatgtggt gaaaacttac cacccccata |
| 2761 | ctatggtttt catttactct aaaaactgat tgaatgatat ataaatatat ttatagcctg |
| 2821 | agtaaagtta aaagaatgta aaatatatca tcaagttctt aaaataatat acatgcattt |
| 2881 | aatatttcct ttgatattat acaggaaagc aatattttgg agtatgttaa gttgaagtaa |
| 2941 | aagcaagtac tctggagcag ttcattttac agtatctact tgcatgtgta tacatacatg |
| 3001 | taacttcatt attttaaaaa tatttttaga actccaatac tcaccctgtt atgtcttgct |
| 3061 | aatttaaatt ttgctaatta actgaaacat gcttaccaga ttcacactgt tccagtgtct |
| 3121 | ataaaagaaa cactttgaag tctataaaaa ataaaataat tataaatatc attgtacata |
| 3181 | gcatgtttat atctgcaaaa aacctaatag ctaattaatc tggaatatgc aacattgtcc |
| 3241 | ttaattgatg caaataacac aaatgctcaa agaaatctac tatatccctt aatgaaatac |
| 3301 | atcattcttc atatatttct ccttcagtcc attcccttag gcaattttta atttttaaaa |
| 3361 | attattatca ggggagaaaa attggcaaaa ctattatatg taagggaaat atatacaaaa |
| 3421 | agaaaattaa tcatagtcac ctgactaaga aattctgact gctagttgcc ataaataact |
| 3481 | caatggaaat attcctatgg gataatgtat tttaagtgaa tttttggggt gcttgaagtt |
| 3541 | actgcattat tttatcaaga agtcttctct gcctgtaagt gtccaaggtt atgacagtaa |
| 3601 | acagttttta ttaaaacatg agtcactatg ggatgagaaa attgaaataa agctactggg |
| 3661 | cctcctctca taaaagagac agttgttggc aaggtagcaa taccagtttc aaacttggtg |
| 3721 | acttgatcca ctatgcctta atggtttcct ccatttgaga aaataaagct attcacattg |
| 3781 | ttaagaaaaa tactttttaa agtttaccat caagtctttt ttatatttat gtgtctgtat |
| 3841 | tctacccctt tttgccttac aagtgatatt tgcaggtatt ataccatttt tctattcttg |
| 3901 | gtggcttctt catagcaggt aagcctctcc ttctaaaaac ttctcaactg ttttcattta |
| 3961 | agggaaagaa aatgagtatt ttgtcctttt gtgttcctac agacactttc ttaaaccagt |
| 4021 | ttttggataa agaatactat ttccaaactc atattacaaa aacaaaataa aataataaaa |
| 4081 | aaagaaagca tgatatttac tgttttgttg tctgggtttg agaaatgaaa tattgtttcc |
| 4141 | aattatttat aataaatcag tataaaatgt tttatgattg ttatgtgtat tatgtaatac |
| 4201 | gtacatgttt atggcaattt aacatgtgta ttcttttaat tgtttcagaa taggataatt |
| 4261 | aggtattcga attttgtctt taaaattcat gtggtttcta tgcaaagttc ttcatatcat |
| 4321 | cacaacatta tttgatttaa ataaaattga aagtaatatt tgtgcaa |

[0297] An exemplary human ANG2 amino acid sequence is set forth below (SEQ ID NO: 61; GenBank Accession No: AAF21627.2, Version 2, incorporated herein by reference):

| | |
|---|---|
| 1 | maaaaaagps pgsgpgdspe gpegeaperr rkahgmlkly yglsegeaag rpagpdpldp |
| 61 | tdlngahfdp evyldklrre cplaqlmdse tdmvrqiral dsdmqtivye nynkfisatd |
| 121 | tirkmkndfr kmedemdrla tnmavitdfs arisatlqdr heritklagv hallrklqfl |
| 181 | felpsrltkc velgaygqav ryggragavl qqyqhlpsfr aiqddcqvit arlaqqlrqr |
| 241 | freggsgape qaecvellla lgepaeelce eflahargrl ekelrnleae lgpsppapdv |
| 301 | leftdhggsg fvgglcqvaa ayqelfaaqg pagaeklaaf arqlgsryfa lverrlageg |
| 361 | gggdnsllvr aldrfhrrlr apgallaaag ladaateive rvarerlghh lqglraaflg |
| 421 | cltdvrqala aprvagkegp glaellanva ssilshikas laavhlftak evsfsnkpyf |
| 481 | rgefcsqgvr eglivgfvhs mcqtaqsfcd spgekggatp palllllsrl cldyetatis |
| 541 | yiltltdeqf lvqdqfpvtp vstlcaeare tarrllthyv kvqglvisqm lrksvetrdw |
| 601 | lstleprnvr avmkrvvedt taidvqvgll yeegvrkaqs sdsskrtfsv ysssrqqgry |
| 661 | apsytpsapm dtnllsniqk lfseridvfs pvefnkvsvl tgiikislkt llecvrlrtf |
| 721 | grfglqqvqv dchflqlylw rfvadeelvh llldevvasa alrcpdpvpm epsvvevice |
| 781 | rg |

[0298] An exemplary human ANG2 nucleic acid sequence is set forth below (SEQ ID NO: 62; GenBank Accession No: AF024631.2, Version 2, incorporated herein by reference):

| | |
|---|---|
| 1 | ttcctttcca gcctcacgcc cgtgggctgc agttggaacg atggcggcgg cagctgccgc |
| 61 | cgggcctagc ccggggtctg gacctgggga ctccccagaa gggcccgagg gggaggctcc |
| 121 | ggagcgtcgg cggaaggcgc acgggatgct gaagctttac tacggcctct cggaagggga |
| 181 | ggcggcggga cgccccgcgg ggcccgaccc cctggacccg actgatctga acggggcgca |
| 241 | cttcgacccg gaagtttacc tagacaagct gcgtagagag tgccctctgg cccagttgat |
| 301 | ggacagtgag acggacatgg tgcggcagat ccgggctcta gacagcgaca tgcagaccct |
| 361 | ggtctatgag aactacaaca agttcatctc agccacagac accatccgga agatgaagaa |
| 421 | cgatttccgg aagatggagg atgagatgga ccggctggcc accaacatgg cagtgatcac |
| 481 | cgacttcagc gctcgcatca gcgccacgct gcaggaccgc cacgagcgca tcaccaagct |
| 541 | ggcaggggtc cacgcgctgc tgcggaagct gcagttcctc tttgagctgc cctcgcgcct |
| 601 | caccaagtgc gtggaactgg gcgcctatgg gcaggcggtg cgctaccagg gccgcgcgca |
| 661 | ggccgtgctg cagcagtacc aacacctgcc ctcgttccgc gccatccagg acgactgcca |
| 721 | ggtcatcacg gcccgcctgg cccagcagct gcggcagcgc tttagggagg gcggctcagg |
| 781 | cgccccggag caggcagagt gcgtggagct gctgctggcc ctgggcgagc ctgcggagga |
| 841 | gctgtgcgag gagttcctgg cgcacgcccg cggccggctg gagaaggagc tgagaaacct |
| 901 | ggaggccgag ctggggccct cacctccggc tcccgacgtg ttagagttca ccgaccatgg |
| 961 | aggcagtggc ttcgtgggcg gcctctgcca ggtggcggcg gcctaccagg agctgtttgc |
| 1021 | ggcccagggc ccagcaggtg ccgagaagct ggcggccttc gcccggcagc tgggcagccg |
| 1081 | ctattttgcg ctggtggagc ggcggctggc gcaggagcag ggtggtggtg acaactcact |
| 1141 | gctggtgcgg gcgctggacc gcttccaccg gcgcttgcgg gctcccgggg ccctgctggc |
| 1201 | cgctgccggg ctcgcagacg ctgccacgga gatcgtggaa cgagtggccc gcgagcgcct |
| 1261 | gggccaccac ctgcagggtc tccgggcggc cttcctgggc tgcctgacag acgtccgcca |
| 1321 | ggcgctggca gcacctcgcg tggctgggaa ggagggccct ggcctggccg agttgctggc |
| 1381 | caatgtggcc agctccatcc tgagccacat taaggcctct ctggcagcag tgcacctttt |
| 1441 | caccgccaaa gaggtgtcct tctccaacaa gccctacttc cggggtgagt tctgcagtca |
| 1501 | gggtgtccgt gagggcctca tcgtgggctt cgtccactct atgtgccaga cggctcagag |
| 1561 | cttctgcgac agccctgggg agaagggggg tgccacacca cctgccctgc tcctgctgct |
| 1621 | ctcccgcctc tgcctggact acgagacggc caccatctcc tacatcctca ctctcactga |
| 1681 | tgaacagttt ctggtgcagg atcagttccc agtgacgccc gtgagcacgc tgtgtgcaga |
| 1741 | ggccagggaa acggcgcggc ggctgctgac ccactacgtg aaggtgcagg gcctggtcat |
| 1801 | atcacagatg ctgcgcaaga gcgtggagac tcgcgactgg ctcagcactc tggagccccg |
| 1861 | gaatgtgcgg gccgtcatga agcgggtggt ggaggatacc accgccatcg acgtgcaggt |
| 1921 | ggggctcctg tacgaagagg gtgttcgcaa ggcccagagc agcgactcca gcaagaggac |
| 1981 | tttctccgtg tacagcagct ctcggcagca gggccgctac gcccccagct atacccccag |
| 2041 | tgccccgatg gacaccaacc tcttgagcaa tatccagaag ctattctctg aacgtattga |
| 2101 | tgtgttcagc cctgtggagt tcaacaaggt gtcggtgctg accggcatca tcaagatcag |
| 2161 | cctgaagacg ctgctggagt gtgtgcggct gcgcaccttt gggcgcttcg ggctgcagca |
| 2221 | ggtgcaagtg gactgccact ttctgcagct ctacctgtgg cgttttgtgg ccgacgaaga |
| 2281 | actcgtgcac ttgctgctgg acgaagtggt ggcctctgct gccctgcgct gcccagaccc |
| 2341 | tgtgcccatg gagcccagtg tggttgaggt catctgcgag cgcggctagg cgcagccgct |
| 2401 | gccatgcacc ggtctgtccc tgcaccccat ggcacccagg atctggtctc ggtggtcctt |
| 2461 | ccccgcaggc aggtgtcagg accggcctaa taaacatgtg tggcctcctc aaaaaaaaaa |
| 2521 | aaaaaaaaaa aaaaaaaaaa aaaaaa |

[0299] An exemplary human PDGFA amino acid sequence is set forth below (SEQ ID NO: 63; GenBank Accession No: P04085.1, Version 1, incorporated herein by reference):

| | |
|---|---|
| 1 | mrtlacllll gcgylahvla eeaeiprevi erlarsqihs irdlqrllei dsvgsedsld |
| 61 | tslrahgvha tkhvpekrpl pirrkrsiee avpavcktrt viyeiprsqv dptsanfliw |
| 121 | ppcvevkrct gccntssvkc qpsrvhhrsv kvakveyvrk kpklkevqvr leehlecaca |
| 181 | ttslnpdyre edtgrpresg kkrkrkrlkp t |

[0300] An exemplary human PDGFA nucleic acid sequence is set forth below (SEQ ID NO: 64; GenBank Accession No: AH002927.2, Version 2, incorporated herein by reference):

| | |
|---|---|
| 1 | ttcgctccca cccggtgccg cagattgcag ctggcactgg agggtgggca agctcgaggg |
| 61 | aggggcgcgg agcgcgcgga cgcgcgcggg gctttgatgg atttagctgc ttgcgcgagc |
| 121 | gcgtgtgtgc tccctgccgc ggcggcgccc gggccctgcc gggtccgcac gaaccccgag |
| 181 | cgcttccgag gtgcgggtcc caggcccgga atccggggag gcgggggggg gggcgggggc |
| 241 | gggggcgggg gaggggcgcg gcggcggcgg ctataaccct ctccccgccg ccggccggct |
| 301 | ccacacgcgc gccctgcgga gcccgcccaa ctccggcgag ccggcctgcg cctactcctc |
| 361 | ctcctcctct cccggcggcg gctgcggcgg aggcgcgact cgccttcgcc cgccctcagg |
| 421 | cccgcgcggg cggcgcagcg aggccccggg cggcgggtgg tggctgccag cggcgtcggc |
| 481 | cggccgctgc ccggccccgg cgagcggagg gcggagcgcg gcgccggagc cgagggccgc |
| 541 | cgcggagggg gtgctgggcc gcgctgtgcc cggccgggcg gcggctgcaa gaggaggccg |
| 601 | gaggcgagcg cggggccggc ggtgggcgcg cagggcggct cgcagctcgc agccggggcc |
| 661 | gggccaggcg ttcaggcagg tgatcggtgt ggcggcggcg gcggcggcgg ccccagactc |
| 721 | cctccggagt tcttcttcgg ggctcgatgt ccgcaaatat gcagaattac cggccgggtc |
| 781 | gctcctgaag ccagcgcggg gagcgagcgc ggcggcggcc agcaccggga acgcaccgag |
| 841 | gaagaagccc agcccccgcc ctccgcccct tccgtcccca ccccctaccc ggcggcccag |
| 901 | gaggctcccc gcgctcgcgg cgcgcactcc ctgtttctcc tcctcctggc tggcgctgcc |
| 961 | tgcctctccg cactcactgc tcgccgggcg ccgtccgcca gctccgtgct ccccgcgcca |
| 1021 | ccctcctccg ggccgcgctc cctaagggat ggtactgaat ttcgccgcca caggagaccg |
| 1081 | gctggagcgc cgccccgcgg cctcgcctct cctccgagca gccagcgcct cgggacgcga |
| 1141 | tgaggacctt ggcttgcctg ctgctcctcg gctgcggata cctcgcccat gttctggccg |
| 1201 | aggttggtgc cgcccccgcg ccccgtctca cgctcggctc ctccggcgca caccccccgc |
| 1261 | cggctggggc ccacgggctc tgcagnnnnn nnnnnnnnnn nnnnnnnnnn nnnnnnnnnn |
| 1321 | nnnnnnnnnn nnnnnnnnnn nnnnnnnnnn nnnnnnnnnn nnnnnnnnnn nnnnnnnnnn |
| 1381 | nnnnntgacc gtgtggcctc tgcttgcagg aagccgagat cccccgcgag gtgatcgaga |
| 1441 | ggctggcccg cagtcagatc cacagcatcc gggacctcca gcgactcctg gagatagact |
| 1501 | ccgtaggtaa atcgcgcccc ttccctcgcg cgcgggnnnn nnnnnnnnnn nnnnnnnnnn |
| 1561 | nnnnnnnnnn nnnnnnnnnn nnnnnnnnnn nnnnnnnnnn nnnnnnnnnn nnnnnnnnnn |
| 1621 | nnnnnnnnnn nnnnnnaggg cccctaatgg cgggagctgt gaggggctgt gccgccaggt |
| 1681 | gcctgttccc cagtggctcc caaagctggt ctgtgggaag tgcggctgga caggcccagg |
| 1741 | gcacagcgca cggggcattc acggtgttct ccttccgcct gcagggagtg aggattcttt |
| 1801 | ggacaccagc ctgacacgtg acggggtcca tgccactaag catgtgcccg agaagaggcc |
| 1861 | cctgcccatt cggaggaaga gaagcatcgg tgagtccagg aggccgcgat gggcagggca |
| 1921 | gggccgggtc ggggtgagtc caggaggccg cgatgggcag ggcagggccg ggtggggagg |
| 1981 | aggagctgcc cgctctccca gcgcagtggc ctcatggcaa gccacccgtt ccctcctccc |
| 2041 | taaaataggc ctggccctgg tgcctctggc tctggcctct ccgagggtgt ctcctgcccn |
| 2101 | nnnnnnnnnn nnnnnnnnnn nnnnnnnnnn nnnnnnnnnn nnnnnnnnnn nnnnnnnnnn |
| 2161 | nnnnnnnnnn nnnnnnnnnn nnnnnnnnnn nnnnnnnnnt gctcctgccc acccagcccc |
| 2221 | tgagcctctg ctcccagctc agcctctgct gcctgggagg aatcctggcc tgtgggttac |
| 2281 | cctggttgcc ccccaggccc agctggagcc gcctcagccc tggggtgggg ccgtggtcgc |
| 2341 | agaggccggt ccccgctcac tgtgcccccg ccgttgcaga ggaagctgtc cccgctgtct |
| 2401 | gcaagaccag gacggtcatt tacgagattc ctcggagtca ggtcgacccc acgtccgcca |
| 2461 | acttcctgat ctggcccccg tgcgtggagg tgaaacgctg caccggctgc tgcaacacga |
| 2521 | gcagtgtcaa gtgccagccc tcccgcgtcc accaccgcag cgtcaaggtg agcnnnnnnn |
| 2581 | nnnnnnnnnn nnnnnnnnnn nnnnnnnnnn nnnnnnnnnn nnnnnnnnnn nnnnnnnnnn |
| 2641 | nnnnnnnnnn nnnnnnnnnn nnnnnnnnnn nnnctgcagc ttgtaggttt tcacctggta |
| 2701 | ctgctacact ccccaccaca aggtagtgtt tctgggagga ggtcaggggt caggctgctc |
| 2761 | tctcctccct ctcagcctgt ccccggctcc cagcacgtcg tgatgtccga agctccatgc |
| 2821 | aggcattcat ggccgggctc tgttctctct ggcaggtggc caaggtggaa tacgtcagga |
| 2881 | agaagccaaa attaaaagaa gtccaggtga ggttagagga gcatttggag tgcgcctgcg |
| 2941 | cgaccacaag cctgaatccg gattatcggg aagaggacac gggtgagtgg ctgccttcgt |
| 3001 | cggcatcgtg ttggagaaca ggtcttcaga gccttgcttt tggggtgtta ggtggccccc |
| 3061 | ttgagcgcaa cgcttactgc tgtgagcatc tgggctgctg ttgaaggatt cgttgccctg |
| 3121 | ctcccgggcc agatgcctgc gggggagacg gatccnnnnn nnnnnnnnnn nnnnnnnnnn |
| 3181 | nnnnnnnnnn nnnnnnnnnn nnnnnnnnnn nnnnnnnnnn nnnnnnnnnn nnnnnnnnnn |
| 3241 | nnnnnnnnnn nnnnntctcg gtgccagggt gctggccttc tcttctggaa agataaagaa |
| 3301 | atgccgtagg tatttgttgc ttcagttctt caccccgacg gccgtccctc ggcccactca |
| 3361 | ccgccctgcc cttttgttaa caggaaggcc tagggagtca ggtaaaaaac ggaaaagaaa |
| 3421 | aaggttaaaa cccacctaaa gcagccaacc aggtaggact gtctgccgga cactgagtcc |
| 3481 | tgctaggcat gcaagnnnnn nnnnnnnnnn nnnnnnnnnn nnnnnnnnnn nnnnnnnnnn |
| 3541 | nnnnnnnnnn nnnnnnnnnn nnnnnnnnnn nnnnnnnnnn nnnnnnnnnn nnnnnctgca |
| 3601 | gatgtgaggt gaggatgagc cgcagccctt tcctgggaca tggatgtaca tggcgtgtta |
| 3661 | cattcctgaa cctactatgt acggtgcttt attgccagtg gcggtctttg ttctcctccg |
| 3721 | tgaaaaactg tgtccgagaa cactcgggag aacaaagaga cagtgcacat ttgtttaatg |
| 3781 | tgacatcaag caagtattgt agcactcggt gaagcagtaa gaagcttcct tgtcaaaaag |
| 3841 | agagagagag agagagagag agaaaacaaa accacaaatg acaaaaacaa aacggactca |
| 3901 | caaaaatatc taaactcgat gagatggagg gtcgccccgt gggatggaag tgcagaggtc |
| 3961 | tcagcagact ggatttctgt ccgggtggtc acagctgctt ttttgccgag gatgcagagc |
| 4021 | ctgctttggg aacgactcca gaggggtgcg tggtgggctc tgcaggggcc cgcaggaagc |
| 4081 | aggaatgtct tggaaaccgc cacggaaact ttagaaacca cacctcctcg ctgtagtatt |
| 4141 | taagcccata cagaaacctt cctgagagcc ttaagtggtt tttttttttg tttttgtttt |
| 4201 | gttttttttt tttttgtttt tttttttttt tttttacacc ataaagtgat tattaagctt |
| 4261 | tttactcttt tgctagcttt tttttttttt ttttttaatt atctctcgga tgacattcac |
| 4321 | acccacaaca cacaggctgc tgtaactgtc aggacagtgc gacggtattt ttcctagcaa |
| 4381 | gatgcaaact aatgagatgt attaaaataa acatggtata cctcctatgc atcatttcct |
| 4441 | aaatctttct ggctttgtgt ttctccctta ccctgcttta tttcttaatt taagccattt |
| 4501 | tgaagaacta tgcgtcaacc aatcgtacgc ctcctgcggc actgcccaga gccc |

[0301] An exemplary human PCDHB2 amino acid sequence is set forth below (SEQ ID NO: 65; GenBank Accession No: EAW61983.1, Version 1, incorporated herein by reference):

| | |
|---|---|
| 1 | meagegkerv pkqrqvliff vllgiaqasc qprhysvaee tesgsfvanl lkdlgleige |
| 61 | lavrgarvvs kgkkmhlqfd rqtgdlllne kldreelcgp tepcvlpfqv llenplqffq |
| 121 | aelrirdvnd hspvfldkei llkipesitp gttflieraq dldvgtnslq nytispnfhf |
| 181 | hlnlqdsldg iilpqlvinr aldreeqpei rltltaldgg spprsgtalv rievvdindn |
| 241 | vpefakllye vqipedspvg sqvaivsard ldigtngeis yafsqasedi rktfrlsaks |
| 301 | gelllrqkld fesiqtytvn iqatdgggls gtcvvfvqvm dlndnppelt mstlinqipe |
| 361 | nlqdtliavf svsdpdsgdn grmvcsiqdd lpfflkpsve nfytlvista ldretrseyn |
| 421 | ititvtdfgt prlktehnit vlvsdvndna paftqtsytl fvrennspal higsvsatdr |
| 481 | dsgtnaqvty sllppqdphl plaslvsina dnghlfalqs ldyealqafe frvgaadrgs |
| 541 | palssealvr vlvldandns pfvlyplqng sapctelvpr aaepgylvtk vvavdgdsgq |
| 601 | nawlsyqllk atepglfgvw ahngevrtar llrerdaakq rlvvlvkdng epprsatatl |
| 661 | hvllvdgfsq pylllpeaap aqaqadlltv ylvvalasvs slflfsvllf vavrlcrrsr |
| 721 | aasvgrcsvp egpfpgqmvd vsgtgtlsqs yqyevcltgg sgtnefkflk piipnfvaqg |
| 781 | aervseanps frksfeft |

[0302] An exemplary human PCDHB2 nucleic acid sequence is set forth below (SEQ ID NO: 66; GenBank Accession No: NM_018936.3, Version 3, incorporated herein by reference):

| | |
|---|---|
| 1 | ccttacccag atactcagct aaagaagcag caagcaggaa gaggaggctt tctaaggcgg |
| 61 | tcgctccggg aaatccgggc cctaggattg tccactcatc ccagtatcag cgagatacgg |
| 121 | ggagatagag ttagcgacaa cgtgagccag agctggagca cgtttggtga gagaccagaa |
| 181 | agcaatggag gccggagagg ggaaggagcg cgttccgaaa caaaggcaag tcctgatatt |
| 241 | ctttgttttg ctgggcatag ctcaggctag ttgccagcct aggcactatt cagtggccga |
| 301 | ggaaacggag agtggctcct ttgtggccaa tttgttaaaa gacctggggc tggagatagg |
| 361 | agaacttgct gtgagggggg ccagggtcgt ttccaaagga aaaaaaatgc atttgcagtt |
| 421 | cgataggcag accggggatt tgttgttaaa tgagaaattg gaccgggagg agctgtgcgg |
| 481 | ccccacagag ccctgtgtcc tacctttcca ggtgttacta gaaaatccct tgcagttttt |
| 541 | tcaggcggag ctacggatta gggacgtaaa tgatcattcc ccagttttcc tagacaaaga |
| 601 | aatacttttg aaaattccag aaagtatcac tcctggaact actttcttaa tagaacgtgc |
| 661 | ccaggacttg gatgtaggaa ccaacagtct ccaaaattac acaatcagtc ccaatttcca |
| 721 | ctttcatctt aatttacaag acagtctcga tggcataata ttaccacagc tggtgctgaa |
| 781 | cagagccctg gatcgcgagg agcagcctga gatcaggtta accctcacag cgctagatgg |
| 841 | cgggagtcca cccaggtccg gcacggccct ggtacggatt gaagttgtgg acatcaatga |
| 901 | caacgtccca gagtttgcaa agctgctcta tgaggtgcag atcccggagg acagccccgt |
| 961 | tggatcccag gttgccatcg tctctgccag ggatttagac attggaacta atggagaaat |
| 1021 | atcttatgca ttttcccaag catctgaaga cattcgcaaa acgtttcgat taagtgcaaa |
| 1081 | atcgggagaa ctgcttttaa gacagaaact ggatttcgaa tccatccaga catacacagt |
| 1141 | aaatattcag gcgacagatg gtgggggcct atctggaact tgtgtggtat ttgtccaagt |
| 1201 | gatggatttg aatgacaatc ctccggaact aactatgtcg acacttatca atcagatccc |
| 1261 | agaaaacttg caggacaccc tcattgctgt attcagcgtt tcagatcctg actccggaga |
| 1321 | caacggaagg atggtgtgct ccatccaaga tgatcttcct tttttcttga aaccttctgt |
| 1381 | tgagaacttt tacactctgg tgataagcac ggccctggac cgggagacca gatccgaata |
| 1441 | caacatcacc atcaccgtca ccgacttcgg gacacccagg ctgaaaaccg agcacaacat |
| 1501 | aaccgtgctg gtctccgacg tcaatgacaa cgcccccgcc ttcacccaaa cctcctacac |
| 1561 | cctgttcgtc cgcgagaaca acagccccgc cctgcacatc ggcagcgtca gcgccacaga |
| 1621 | cagagactcg ggcaccaacg cccaggtcac ctactcgctg ctgccgcccc aggacccgca |
| 1681 | cctgcccctc gcctccctgg tctccatcaa cgcggacaac ggccacctgt tcgctctcca |
| 1741 | gtcgctggac tacgaggccc tgcaggcgtt cgagttccgc gtgggcgccg cagaccgcgg |
| 1801 | ctccccggcg ttgagcagcg aggcgctggt gcgcgtgctg gtgctggacg ccaacgacaa |
| 1861 | ctcgcccttc gtgctgtacc cgctgcagaa cggctccgcg ccctgcaccg agctggtgcc |
| 1921 | ccgggcggcc gagccgggct acctggtgac caaggtggtg gcggtggacg gcgactcggg |
| 1981 | ccagaacgcc tggctgtcgt accagctgct caaggccacg gagcccgggc tgttcggcgt |
| 2041 | gtgggcgcac aatggcgagg tgcgcaccgc caggctgctg agggagcgcg acgctgccaa |
| 2101 | gcagaggctg gtggtgctgg tcaaggacaa tggcgagcct ccgcgctcgg ccaccgccac |
| 2161 | gctgcacgtg ctcctggtgg acggcttctc ccagccctac ctgctgctcc cggaggcggc |
| 2221 | accggcccag gcccaggccg acttgctcac cgtctacctg gtggtggcgt tggcctcggt |
| 2281 | gtcttcgctc ttcctcttct cggtgctcct gttcgtggcg gtgcggctgt gcaggaggag |
| 2341 | cagggcggcc tcggtgggtc gctgctcggt gcccgagggc ccctttccag ggcagatggt |
| 2401 | ggacgtgagc ggcaccggga ccctgtccca gagctaccag tacgaggtgt gtctgactgg |
| 2461 | aggctccggg acaaatgagt tcaagttcct gaagccaatt atccccaact tcgttgctca |
| 2521 | gggtgcagag agggttagcg aggcaaatcc cagtttcagg aagagctttg aattcactta |
| 2581 | agtgttaata aggatctact gaggctagtc tcgtttaatt tgtggaaagt ccttttttac |
| 2641 | tgctttgccc attggaggtg tctcctttta ttagaaagta accatcttat tccaattcta |
| 2701 | tgcatgttac tggtatttat aaatgtatga gtttttttgc ggtataataa atgtaaattt |
| 2761 | tctttgtatt ctaaaaaaa |

[0303] An exemplary human PCDHB3 amino acid sequence is set forth below (SEQ ID NO: 67; GenBank Accession No: EAW61981.1, Version 1, incorporated herein by reference):

| | |
|---|---|
| 1 | meaggerflr qrqvlllfvf lggslagses rrysvaeeke kgflianlak dlglrveela |
| 61 | argaqvvskg nkqhfqlshq tgdlllnekl dreelcgpte pcilhfqill qnplqfvtne |
| 121 | lriidvndhs pvffenemhl kilestlpgt viplgnaedl dvgrnslqny titpnshfhv |
| 181 | ltrsrrdgrk ypelvldkal dreeqpelsl tltaldggsp prsgtaqini qvldindnap |
| 241 | efaqplyeva vlentpvnsv ivtvsasdld tgsfgtisya ffhaseeirk tfqlnpitgd |
| 301 | mqlvkylnfe ainsyevdie akdggglsgk stvivqvvdv ndnppeltls svnspipens |
| 361 | getvlavfsv sdldsgdngr vmcsiennlp fflkpsvenf ytlvsegald retrseynit |
| 421 | ititdlgtpr lktkynitvl vsdvndnapa ftqisytlfv rennspalhi gsvsatdrds |
| 481 | gtnaqvtysl lppqdphlpl sslvsinadn ghlfalrsld yealqafefr vgatdrgspa |
| 541 | lssealvrvl vldandnspf vlyplqngsa pctelvpraa epgylvtkvv avdgdsgqna |
| 601 | wlsyqllkat epglfgvwah ngevrtarll serdaakhrl vvlvkdngep prsatatlhv |
| 661 | llvdgfsqpy lplpeaapaq aqadlltvyl vvalasvssl flfsvllfva vrlcrrsraa |
| 721 | svgrcsvpeg pfpgqmvdvs gtgtlsqsyq yevcltggsg tnefkflkpi ipnfvaqgae |
| 781 | rvseanpsfr ksfefs |

[0304] An exemplary human PCDHB3 nucleic acid sequence is set forth below (SEQ ID NO: 68; GenBank Accession No: NM_018937.4, Version 4, incorporated herein by reference):

| | |
|---|---|
| 1 | tgctcgtaga taaaagtgca ttttatttcc ctagattgca tttatttaat tcatataaca |
| 61 | tgagaaactc ctccagtagc gtcaactagg gttgataaga ataatcgata aagcaaaata |
| 121 | aaaacacctt ctccaagatt ttgtaactgc aagcgaacgc atggtggcgc tgttgactaa |
| 181 | gaaggcgaat taaaccacag gcattgtgca tgctcggtga cgcacggatc cagtgtggta |
| 241 | aaccagcggt tgagagccca ggcagatttt tgagccagca agtctgagcc tctggaaagg |
| 301 | cttattcact aggccgtcta caaaggttgt ggggcaaaag actgtttccc agctctgtct |
| 361 | gaggttcagc ttggcgacat tccctggaag agcgtgacgg aaagtgcaat ggaggcggga |
| 421 | ggagagcgat ttcttagaca aaggcaagtc ttgcttctct ttgtttttct gggagggtct |
| 481 | ctggctgggt ccgagtcaag acgctattct gtggctgagg aaaaagagaa gggcttttta |
| 541 | atagccaacc tagcaaagga tctgggacta agggtagagg aactggccgc gaggggggcc |
| 601 | caagttgtgt ccaaagggaa caaacagcat tttcagctca gtcatcagac aggtgatttg |
| 661 | ctcctgaatg agaaattgga ccgggaggag ctatgcggcc ccacagaacc atgcatacta |
| 721 | cattttcaga tattactgca aaaccctttg caattcgtta caaacgagct ccgtatcata |
| 781 | gatgtaaatg accattctcc ggtattcttt gaaaatgaaa tgcatctgaa aatcctagaa |
| 841 | agcactctgc caggaacagt aattcctttg ggaaatgctg aggacttgga tgtgggaaga |
| 901 | aacagcctcc aaaactacac tatcactccg aattcccact tccacgtact cactcgcagt |
| 961 | cgtagggacg gaaggaagta cccggaacta gtactggata aagcgctcga tcgggaggag |
| 1021 | cagccggaac tcagcttaac gctcaccgcg ctggacggcg gctctccccc tcggtctggg |
| 1081 | acagcccaga taaacatcca ggtcttagat ataaacgaca atgcaccaga atttgcacag |
| 1141 | ccgctctatg aggttgcagt tctagagaat acccccgtta actctgtcat tgtcactgtc |
| 1201 | tcggcttctg acttagatac aggaagtttt gggacaatat catatgcatt ttttcatgct |
| 1261 | tctgaagaaa ttcgcaaaac ttttcagcta aatccaatta ctggtgatat gcaactggtc |
| 1321 | aaatatttga attttgaagc gattaatagt tatgaagtcg acatcgaggc caaggatggc |
| 1381 | ggaggcctat ccggaaagtc tacagtcata gtccaggtgg ttgatgtcaa cgacaaccca |
| 1441 | ccggaactga ccttgtcttc agtaaacagc cctattcctg agaactcggg agagactgta |
| 1501 | ctggctgttt tcagtgtttc tgatctagac tctggagaca acggaagagt gatgtgttcc |
| 1561 | attgagaaca atctcccctt cttcctgaaa ccatctgtag agaattttta caccctagtg |
| 1621 | tcagaaggcg cgctggacag agagaccaga tccgagtaca acattaccat cactatcact |
| 1681 | gacctgggga cacccaggct gaaaaccaag tacaacataa ccgtgctggt ctccgacgtc |
| 1741 | aatgacaacg cccccgcctt cacccaaatc tcctacaccc tgttcgtccg cgagaacaac |
| 1801 | agccccgccc tgcacatcgg cagtgtcagc gccacagaca gagactcagg caccaacgcc |
| 1861 | caggtaacct actcgctgct gccgccccag gacccgcacc tgcccctctc ttccctggtc |
| 1921 | tccatcaacg cggacaacgg ccacctgttt gccctcaggt cgctggacta cgaggccctg |
| 1981 | caggcgttcg agttccgcgt gggcgccaca gaccgtggct ccccggcttt gagcagcgag |
| 2041 | gcgctggtgc gcgtgctggt gctggacgcc aacgacaact cgcccttcgt gctgtacccg |
| 2101 | ctgcagaacg gctccgcgcc ctgcaccgag ctggtgcccc gggcggctga gccgggctac |
| 2161 | ctggtgacca aggtggtggc ggtggacggc gactcgggcc agaacgcctg gctgtcgtac |
| 2221 | cagctgctca aggccacgga gcccgggctg ttcggcgtgt gggcgcacaa tggcgaagtg |
| 2281 | cgcaccgcca ggctgctgag cgagcgcgac gcggccaagc acaggctggt ggtgctggtc |
| 2341 | aaggacaatg gcgagcctcc gcgctcggcc accgccacgc tgcatgtgct cctggtggac |
| 2401 | ggcttctccc agccctacct gcctctcccg gaggcggcac cggcccaggc ccaggccgac |
| 2461 | ttgctcaccg tctacctggt ggtggcattg gcctcggtgt cttcgctctt cctcttttcg |
| 2521 | gtgctcctgt tcgtggcggt gcggctgtgc aggaggagca gggcggcctc ggtgggtcgc |
| 2581 | tgctcggtgc ccgagggccc ctttccaggg cagatggtgg acgtgagcgg caccgggacc |
| 2641 | ctgtcccaga gctaccagta cgaggtgtgt ctgactggag gctccgggac aaatgagttc |
| 2701 | aagttcctga agccaattat ccccaacttc gttgctcagg gtgcagagag ggttagcgag |
| 2761 | gcaaatccca gtttcaggaa gagctttgaa ttcagttaag tgttaataag gatctactga |
| 2821 | gcctcgtctt agttaatctg tggaaagtcc ttttttactg ctttgtccat tggagaggtc |
| 2881 | ttttttggtc tggttcaagg caagtagcaa gaatagagca aaatatcaaa tccagggatg |
| 2941 | gcttaggttt cattaacagt actggaaagt agttgtgtgg ctctgaatgt tttgtatttc |
| 3001 | aatcgagaat ccttagtcga tagaacattt tgtttatata ttgattctac tttttctgta |
| 3061 | gttaatcctt gcatattctc ctttcatcct ggcttgccaa cgcagtctta attccgcctt |
| 3121 | ttttttttct aatggggagc aaaaagaaat tcactgtctt ttaatagtga tttcaaatag |
| 3181 | cttattaaaa taactccatt caaattttac attataaagc aatgtagaga gagttccaaa |
| 3241 | ccaccaattt tataatttcc cttgttgaat atattcatat aatgtgttct ataatatgcc |
| 3301 | caaagcagct ttgtctatag ttaacaaagt tttaaggata gacaagaatg tgttttcttt |
| 3361 | aataaatagt aatatatcat ctttttaggg atatagtact caaatgaaag taatttagtt |
| 3421 | cattttctgt gttgacattt gcaattaata tttcaatatt ttatgtgctt atattggcca |
| 3481 | aaatatggac acaaatatag actaatatgg gtaattaccc tttggtttat ctaaagtgtg |
| 3541 | ttcatgatga ctgaggaaaa aaattaaacc tatgccattt aaaaaaaaaa aaa |

[0305] An exemplary human PCDHB6 amino acid sequence is set forth below (SEQ ID NO: 69; GenBank Accession No: EAW61978.1, Version 1, incorporated herein by reference):

| | |
|---|---|
| 1 | mmqtkvqnkk rqvaffillm lwgevgsesi qysvleetes gtfvanltkd lglrvgelas |
| 61 | rgarvvfkgn rqhlqfdpqt hdlllnekld reelcgstep cvlpfqvlle nplqffqasl |
| 121 | rvrdindhap efparemllk iseitmpgki fplkmandld tgsnglqryt issnphfhvl |
| 181 | trnrsegrkf pelvldkpld reeqpqlrlt lialdggspp rsgtseiqiq vldindnvpe |
| 241 | faqelyeaqv pennplgslv itvsardlda gsfgkvsyal fqvddvnqpf einaitgeir |
| 301 | lrkaldfeei qsydvdveat dggglsgkcs lvvrvldvnd napeltmsff islipenlpe |
| 361 | itvavfsvsd adsghnqqvi csiennlpfl lrpsvenfyt lvtegaldre sraeynitit |
| 421 | vtdlgtprlk tqqsitvqvs dvndnapaft qtsytlfvre nnspalhigs vsatdrdsgi |
| 481 | naqvtysllp pqdphlplss lvsinadngh lfalrsldye alqsfefrvg atdrgspals |
| 541 | sealvrllvl dandnspfvl yplqngsapc telvpraaep gylvtkvvav dgdsgqnawl |
| 601 | syqllkatep glfgvwahng evrtarllse rdaakqrlvv lvkdngeppr satatlhvll |
| 661 | vdgfsqpylp lpeaapaqaq adsltvylvv alasvsslfl fsvllfvavr lcrrsraasv |
| 721 | grysvpegpf pghlvdvsgt gtlsqsyqyk vcltggsetn efkflkpimp nfppqgtere |
| 781 | meetptsrns fpfs |

[0306] An exemplary human PCDHB6 nucleic acid sequence is set forth below (SEQ ID NO: 70; GenBank Accession No: AF217752.1, Version 1, incorporated herein by reference):

| | |
|---|---|
| 1 | atgatgcaaa ctaaagtaca gaacaagaaa aggcaagtgg ctttcttcat tttattgatg |
| 61 | ctttggggag aggtgggttc tgaatcgatt cagtattccg tattggagga gacagaaagt |
| 121 | ggcacgtttg tggccaactt gacaaaggac ctgggactga gggtggggga gctggcttcg |
| 181 | cggggcgctc gggttgtttt caaagggaac agacaacatt tgcagtttga tccacagacc |
| 241 | catgatttac tgctaaatga aaaactggac cgggaggagc tgtgtggctc cactgagccg |
| 301 | tgtgtgctac ctttccaagt gttactggaa aaccccttgc agttttttca ggcttccttg |
| 361 | cgagtcagag atataaatga ccacgccccg gaattccctg ccagagaaat gctcctgaaa |
| 421 | atatcagaaa ttactatgcc aggaaagata tttcctttga aaatggcaca cgatttagac |
| 481 | accggcagca acggccttca gaggtacaca atcagctcca accctcactt ccacgttctc |
| 541 | acccgcaatc gcagcgaagg caggaagttc ccggagctgg tgctagacaa accgttggac |
| 601 | cgcgaggagc agccccaact caggctaacg ctgatcgcgc tggatggcgg gtctccgccc |
| 661 | cggtcaggga cctccgagat tcagatccag gttttggaca tcaatgacaa cgtccccgag |
| 721 | tttgctcagg agctctatga agcacaagtc cctgagaaca accccctcgg ctctctggtt |
| 781 | attaccgtct cagccagaga tttagatgca ggatcgtttg ggaaggtatc ttacgccctg |
| 841 | tttcaagtcg atgacgtcaa ccaacccttc gaaataaacg caatcacagg agaaattcgg |
| 901 | ctgagaaagg ctttggattt tgaggaaatt cagtcttatg acgtggatgt tgaggctaca |
| 961 | gatggtggag gcctatcagg aaaatgctct ttagtcgtca gggtcctgga cgtgaatgac |
| 1021 | aatgcccctg aactcaccat gtcgttcttc atcagcctca tcccagaaaa cttaccagag |
| 1081 | atcacagtgg cagttttcag tgtttcagat gcagactctg gacataacca acaggttatt |
| 1141 | tgttcaatag agaacaatct cccctttcta ctaagacctt ccgtggagaa tttctacacc |
| 1201 | ctggtaacag aaggcgcgct ggacagagag agcagagccg agtacaacat cactatcacg |
| 1261 | gtcactgatt tggggacacc aaggctgaaa acccagcaga gcataactgt gcaggtctcc |
| 1321 | gacgtcaatg acaacgtccc cgccttcacc caaacctcct acaccctgtt cgtccgcgag |
| 1381 | aacaacagcc ccgccctgca catcggcagc gtcagcgcca cagacagaga ctcaggcatc |
| 1441 | aacgcccagg tcacctactc gctgctgccg ccccaggacc cgcacctgcc cctctcttcc |
| 1501 | ctggtctcca tcaacgcgga caacggccac ctgtttgccc tcaggtcgct ggactacgag |
| 1561 | gccctgcagt ctttcgagtt ccgcgtgggc gccacagacc gcggctcccc ggcgttgagc |
| 1621 | agcgaggcgc tggtgcgctt gctggtgctg gacgccaacg acaactcgcc cttcgtgttg |
| 1681 | tacccgctgc agaacggctc cgcgccctgc accgagctgg tgccccgggc ggccgagccg |
| 1741 | ggctacctgg tgaccaaggt ggtggcggtg gacggcgact cgggccagaa cgcctggctg |
| 1801 | tcgtaccagc tgctcaaggc cacggagctc ggtctgttcg gcgtgtgggc gcacaatggc |
| 1861 | gaggtgcgca ccgccaggct gctgagcgag cgagacgcag ccaagcacag gctggtggtg |
| 1921 | cttgtcaagg acaatggcga gcctccgcgc tcggccaccg ccacgctgca cgtgctcctg |
| 1981 | gtggacggct tctcccagcc ctacctgcct ctccctgagg cggccccggc ccaagcccag |
| 2041 | gccgactctc tcaccgtcta cctggtggtg gcgttggcct cggtgtcgtc gctcttcctc |
| 2101 | ttttcggtgc tcctgttcgt ggcggtgcgg ctgtgcagga ggagcagggc ggcctcggtg |
| 2161 | ggtcgctact cggtgcccga gggtcccttt ccagggcatc tggtggatgt gagcggcacc |
| 2221 | gggaccctat cccagagcta ccagtacaag gtgtgtctga cgggaggctc agaaacaaat |
| 2281 | gagttcaagt tcctgaagcc gattatgccc aacttccctc ctcagggcac tgagagagaa |
| 2341 | atggaagaaa cccccacctc tcggaatagc ttcccgttca gttaagtgtg ggattatttt |
| 2401 | actaaatctt acttatgttt ggagatctct tttaacttaa agttacatgg tctgtttctt |
| 2461 | gtttatttta cctctattct ttaggttgaa attttatata aagtaagata ctggtatctt |
| 2521 | agtatttcct gttcatgctt agtagtttat tacttcactt gagggtactt gacaatatga |
| 2581 | acaaaaagta aatttttatt tgcataattt taagcttttg aaattaaatt atctattctt |
| 2641 | ccccccccca aaaaaaagta ttgtaaatcc ttaagtaaaa ttgtatttct agctattggt |
| 2701 | aagagttgtt tcactattgc tatgtaggac tgtttaaaat gtgagtatct gatattattt |
| 2761 | aatcctccaa tgtctcattt tgcagtaact cctacagtgt gtaacactaa aaataagaac |
| 2821 | taatgatggc taaacactaa agtagccatt catacttatg catattttag tatcccataa |
| 2881 | tagtcaatcc aaaatttttg tgactataga ctttactgaa gtgtcaacac attagtttgt |
| 2941 | gagcctcatg taagaacatg atggtctttt tttaaaaaaa aagtcgtgcc aattataagt |
| 3001 | gcttaataaa tatttgctga atgttactaa |

[0307] An exemplary human PCDHB10 amino acid sequence is set forth below (SEQ ID NO: 71; GenBank Accession No: AAQ89082.1, Version 1, incorporated herein by reference):

| | |
|---|---|
| 1 | mavrelcfpr qrqvlflflf wgvslagsgf grysvteete kgsfvvnlak dlglaegela |
| 61 | argtrvvsdd nkqyllldsh tgnlltnekl dreklcgpke pcmlyfqilm ddpfqiyrae |
| 121 | lrvrdindha pvfqdketvl kisentaegt afrleraqdp dgglngiqny tispnsffhi |
| 181 | nisggdegmi ypelvldkal dreeqgelsl tltaldggsp srsgtstvri vvldvndnap |
| 241 | qfaqalyetq apenspigfl ivkvwaedvd sgvnaevsys ffdasenirt tfqinpfsge |
| 301 | iflrelldye lvnsykiniq amdggglsar crvlvevldt ndnppelivs sfsnsvaens |
| 361 | petplavfki ndrdsgengk mvcyiqenlp fllkpsvenf yilitegald reiraeynit |
| 421 | itvtdlgtpr lktehnitvl vsdvndnapa ftqtsytlfv rennspalhi gsvsatdrds |
| 481 | gtnaqvtysl lppqdphlpl aslvsinadn ghlfalrsld yealqafefr vgatdrgspa |
| 541 | lsrealvrvl vldandnspf vlyplqngsa pctelvpraa epgylvtkvv avdgdsgqna |
| 601 | wlsyqllkat epglfgvwah ngevrtarll serdaakhrl vvlvkdngep prsatatlhl |
| 661 | llvdgfsqpy lplpeaapaq aqaeadlltv ylvvalasvs slfllsvllf vavrlcrrsr |
| 721 | aasvgrcsvp egpfpghlvd vrgaetlsqs yqyevcltgg pgtsefkflk pvisdiqaqg |
| 781 | pgrkgeenst frnsfgfniq |

[0308] An exemplary human PCDHB10 nucleic acid sequence is set forth below (SEQ ID NO: 72; GenBank Accession No: NM_018930.3, Version 3, incorporated herein by reference):

| | |
|---|---|
| 1 | gaagacacgg acagatgaac ttaaaagaga agctttagct gccaaagatt gggaaaggga |
| 61 | aaggacaaaa aagacccctg ggctacacgg cgtaggtgca gggtttccta ctgctgttct |
| 121 | tttatgctgg gagctgtggc tgtaaccaac taggaaataa cgtatgcagc agctatggct |
| 181 | gtcagagagt tgtgcttccc aagacaaagg caagtcctgt ttctttttct tttttgggga |
| 241 | gtgtccttgg caggttctgg gtttggacgt tattcggtga ctgaggaaac agagaaagga |
| 301 | tcctttgtgg tcaatctggc aaaggatctg ggactagcag agggggagct ggctgcaagg |
| 361 | ggaaccaggg tggtttccga tgataacaaa caatacctgc tcctggattc acataccggg |
| 421 | aatttgctca caaatgagaa actggaccga gagaagctgt gtggccctaa agagccctgt |
| 481 | atgctgtatt tccaaatttt aatggatgat ccctttcaga tttaccgggc tgagctgaga |
| 541 | gtcagggata taaatgatca cgcgccagta tttcaggaca aagaaacagt cttaaaaata |
| 601 | tcagaaaata cagctgaagg gacagcattt agactagaaa gagcacagga tccagatgga |
| 661 | ggacttaacg gtatccaaaa ctacacgatc agccccaact cttttttcca tattaacatt |
| 721 | agtggcggtg atgaaggcat gatatatcca gagctagtgt tggacaaagc actggatcgg |
| 781 | gaggagcagg gagagctcag cttaaccctc acagcgctgg atggtgggtc tccatccagg |
| 841 | tctgggacct ctactgtacg catcgttgtc ttggacgtca atgacaatgc cccacagttt |
| 901 | gcccaggctc tgtatgagac ccaggctcca gaaaacagcc ccattgggtt ccttattgtt |
| 961 | aaggtatggg cagaagatgt agactctgga gtcaacgcgg aagtatccta ttcatttttt |
| 1021 | gatgcctcag aaaatattcg aacaaccttt caaatcaatc ctttttctgg ggaaatcttt |
| 1081 | ctcagagaat tgcttgatta tgagttagta aattcttaca aaataaatat acaggcaatg |
| 1141 | gacggtggag gcctttctgc aagatgtagg gttttagtgg aagtattgga caccaatgac |
| 1201 | aatccccctg aactgatcgt atcatcattt tccaactctg ttgctgagaa ttctcctgag |
| 1261 | acgccgctgg ctgtttttaa gattaatgac agagactctg gagaaaatgg aaagatggtt |
| 1321 | tgctacattc aagagaatct gccattccta ctaaaacctt ctgtggagaa tttttacatc |
| 1381 | ctaattacag aaggcgcgct ggacagagag atcagagccg agtacaacat cactatcacc |
| 1441 | gtcactgact tggggacacc caggctgaaa accgagcaca acataacggt cctggtctcc |
| 1501 | gacgtcaatg acaacgcccc cgccttcacc caaacctcct acaccctgtt cgtccgcgag |
| 1561 | aacaacagcc ccgccctgca catcggcagc gtcagcgcca cagacagaga ctcgggcacc |
| 1621 | aacgcccagg tcacctactc gctgctgccg ccccaagacc cgcacctgcc cctcgcctcc |
| 1681 | ctggtctcca tcaacgcgga caacggccac ctgttcgccc tcaggtcgct ggactacgag |
| 1741 | gccctgcagg ctttcgagtt ccgcgtgggc gccacagacc gcggctcccc cgcgctgagc |
| 1801 | agagaggcgc tggtgcgcgt gctggtgctg gacgccaacg acaactcgcc cttcgtgctg |
| 1861 | tacccgctgc agaacggctc cgcgccctgc accgagctgg tgccccgggc ggccgagccg |
| 1921 | ggctacctgg tgaccaaggt ggtggcggtg gacggcgact cgggccagaa cgcctggctg |
| 1981 | tcgtaccagc tgctcaaggc cacggagccc gggctgttcg gtgtgtgggc gcacaatggg |
| 2041 | gaggtgcgca ccgccaggct gctgagcgag cgcgacgcag ccaagcacag gctcgtggtg |
| 2101 | cttgtcaagg acaatggcga gcctcctcgc tcggccaccg ccacgctgca cttgctcctg |
| 2161 | gtggacggct tctcccagcc ctacctgcct ctcccggagg cggccccggc ccaggcccag |
| 2221 | gccgaggccg acttgctcac cgtctacctg gtggtggcgt tggcctcggt gtcttcgctc |
| 2281 | ttcctcctct cggtgctcct gttcgtggcg gtgcggctgt gcaggaggag cagggcggcc |
| 2341 | tcggtgggtc gctgctcggt gcccgagggt ccttttccag ggcatctggt ggacgtgagg |
| 2401 | ggcgctgaga ccctgtccca gagctaccag tatgaggtgt gtctgacggg aggccccggg |
| 2461 | accagtgagt tcaagttctt gaaaccagtt atttcggata ttcaggcaca gggccctggg |
| 2521 | aggaagggtg aagaaaattc caccttccga aatagctttg gatttaatat tcagtaaagt |
| 2581 | ctgtttttag tttcatatac ttttggtgtg ttacatagcc atgtttctat tagtttactt |
| 2641 | ttaaatctca aatttaagtt attatgcaac ttcaagcatt attttcaagt agtatacccc |
| 2701 | tgtggtttta caatgtttca tcattttttt gcattaataa caactgggtt taatttaatg |
| 2761 | agtatttttt tctaaatgat agtgttaagg ttttaattct ttccaactgc ccaaggaatt |
| 2821 | aattactatt atatctcatt acagaaatct gaggttttga ttcatttcag agcttgcatc |
| 2881 | tcatgattct aatcacttct gtctatagtg tacttgctct atttaagaag gcatatctac |
| 2941 | atttccaaac tcattctaac attctatata ttcgtgtttg aaaaccatgt catttatttc |
| 3001 | tacatcatgt atttaaaaag aaatatttct ctactactat gctcatgaca aaatgaaaca |
| 3061 | aagcatattg tgagcaatac tgaacatcaa taataccctt agtttatata cttattattt |
| 3121 | tatctttaag catgctactt ttacttggcc aatattttct tatgttaact tttgctgatg |
| 3181 | tataaaacag actatgcctt ataattgaaa taaaattata atctgcctga aaatgaataa |
| 3241 | aaataaaaca ttttgaaatg tgaaaaaaaa aaaaaaaaaa aaaa |

[0309] An exemplary human PCDHGA3 amino acid sequence is set forth below (SEQ ID NO: 73; GenBank Accession No: Q9Y5H0.2, Version 2, incorporated herein by reference):

| | |
|---|---|
| 1 | mtnclsfrng rglallcall gtlcetgsgq irysvseeld kgsfvgnian dlgleprela |
| 61 | ergvrivsrg rtqlfslnpq sgslvtaeri dreelcaqip lclvkinilv edklkifeve |
| 121 | ieikdindna pnfpteelei kigeltvpgt rfpiktafdp dvginslqny klspndyfsl |
| 181 | avnsysegak ypelvleral drekkeihql vlvasdggdp vhsgnlhiqv ivldandnpp |
| 241 | mftqpeyrvs vwenvpvgtr lltvnatdpd egfnaqvsyi ldkmpgkiae ifhlnsvsge |
| 301 | vsilksldye damfyeikie aqdgpgllsr akilvtvldv ndnapeitit sltssvpeeg |
| 361 | tvgreialid vhdrdsgqng gvevfvlgnl pfkleksidq yyrlvtatsl dreqiseyni |
| 421 | slrasdggsp plstethitl hvidindnpp tfphlsysay ipennprgas ifsvtaqdpd |
| 481 | snnnaritya ltedtlqgap lssfvsinsn tgvlyalrsf dyeqfrdlkl lvtasdsgnp |
| 541 | plssnvslnl fvldqndnap eilypalptd gstgvelapr saepgylvtk vvavdrdsgq |
| 601 | nawlsyrllk asepglfsvg lhtgevrtar alldrdalkq slvvavqdhg qpplsatvtl |
| 661 | tvavadripd iladlgslep sakpndsdlt lylvvavaav scvflafviv llalrlrrwh |
| 721 | ksrllqasgg glastpgshf vgadgvrafl qtyshevslt adsrkshlif pqpnyadtli |
| 781 | sqesceksep llitqdllem kgdsnllqqa ppntdwrfsq aqrpgtsgsq ngddtgtwpn |
| 841 | nqfdtemlqa milasaseaa dgsstlggga gtmglsaryg pqftlqhvpd yrqnvyipgs |
| 901 | natltnaagk rdgkapaggn gnkkksgkke kk |

[0310] An exemplary human PCDHGA3 nucleic acid sequence is set forth below (SEQ ID NO: 74; GenBank Accession No: NM_018916.3, Version 3, incorporated herein by reference):

| | |
|---|---|
| 1 | atgaccaatt gcctgagttt ccgaaatggc agaggactgg ccctgctgtg cgcgctcctg |
| 61 | gggacgctgt gcgaaacagg atccggtcag atccgctact cggtgtctga ggagctagat |
| 121 | aaaggttcct tcgtgggcaa catcgctaac gacctggggc tagagccccg ggagctggcg |
| 181 | gagcgcggag tccgcatcgt ctccagaggt aggacgcagc ttttctctct gaatccgcaa |
| 241 | agcggcagct tggtcaccgc ggagaggata gaccgggagg agctctgcgc tcagatcccg |
| 301 | ctgtgtctgg taaaaattaa cattctggtt gaggataaat tgaaaatttt tgaagtagaa |
| 361 | atagaaatta aagatattaa tgataatgct cctaatttcc caacagagga attggaaata |
| 421 | aaaattggtg aactaacggt tcctggaacc cgatttccaa ttaaaactgc ttttgaccca |
| 481 | gatgtaggca ttaactccct gcagaactac aagcttagcc ccaatgacta cttctctctg |
| 541 | gctgtgaata gcgtctctga gggggccaag tatccagagc tggtgctgga gcgggccctg |
| 601 | gaccgtgaga aaaaagaaat tcaccagctt gtcctggttg cctctgatgg tggcgaccct |
| 661 | gtccactctg gcaacttgca catccaagtg atagtcctgg atgcaaatga caacccacca |
| 721 | atgtttactc agcctgagta ccgtgtgagt gtttgggaga acgtgcctgt gggtacccgg |
| 781 | ctgctcacgg tgaatgccac tgaccctgac gagggattca atgctcaagt gtcttatatt |
| 841 | ctagataaaa tgcctgggaa aatcgctgag attttccatc ttaactcagt gagtggagaa |
| 901 | gtatcaatat taaaaagtct agattatgag gatgccatgt tctatgaaat taaaattgaa |
| 961 | gcacaggatg gaccaggtct tctttcaaga gccaagattc tagtcacggt tctggatgtg |
| 1021 | aatgacaatg ctccagaaat tacaatcacg tctctcacaa gctcagtccc agaagagggc |
| 1081 | accgttggaa gagaaattgc tcttatcgac gtgcatgacc gagattctgg gcagaatggg |
| 1141 | caggttgaag tttttgtcct gggaaatctg ccatttaagt tagaaaaatc aatagatcaa |
| 1201 | tattaccgct tagtgacggc cacatccctg gaccgcgaac aaatatcaga atataacatt |
| 1261 | agtctgagag cctcagatgg gggaagcccg ccactgtcca cagaaactca catcaccctg |
| 1321 | catgtgattg acatcaatga caacccaccc accttccctc atttatccta ctccgcctac |
| 1381 | attccagaaa acaaccccag aggagcctcc atcttctcag tgacagccca ggacccagat |
| 1441 | agcaacaaca acgcccgcat cacttatgca ttgaccgagg acactctcca gggggcgccc |
| 1501 | ctgtcctcct tcgtctctat caactccaac actggcgtcc tatacgcgct gagatccttc |
| 1561 | gactacgagc aatttagaga cttaaagcta ctggtgacag ccagcgacag cgggaaccct |
| 1621 | ccactcagca gcaacgtgtc gctgaacctg ttcgtgctgg accagaacga caacgcgccc |
| 1681 | gagatcctgt accccgccct ccccacagac ggttccactg gcgtggagct ggcgcctcgc |
| 1741 | tccgcagagc ccggctacct ggtgaccaag gtggtggcgg tggacagaga ctcgggccag |
| 1801 | aacgcctggc tgtcctaccg cctgctcaag gccagcgagc cgggactctt ctcggtgggt |
| 1861 | ctgcacacgg gcgaggtgcg cacggcgcga gccctgctgg acagagacgc gctcaagcag |
| 1921 | agcctcgtgg tggccgtcca ggaccacggc cagccccctc tctccgccac tgtcacgctc |
| 1981 | accgtggccg tggccgacag gatccccgac atcctggccg acctgggcag cctcgagccc |
| 2041 | tccgccaaac ccaacgattc ggacctcact ctgtacctgg tggtggcggt ggccgcggtc |
| 2101 | tcctgcgtct tcctggcctt cgtcatcgtg ctgctggcgc tcaggctgcg gcgctggcac |
| 2161 | aagtcacgcc tgctgcaggc ttcgggaggc ggcttggcga gtacgcccgg ctcgcacttt |
| 2221 | gtgggcgcgg acggggttcg ggctttcctg cagacctatt cccacgaggt ctccctcact |
| 2281 | gcggactcgc ggaagagcca cctgattttc ccccagccca actatgcgga cacgctcatc |
| 2341 | agccaggaga gctgtgagaa aagcgagcct cttctgataa ctcaggattt acttgaaatg |
| 2401 | aaaggagatt ccaacctact tcagcaagcc ccgcccaaca cggactggcg tttctctcag |
| 2461 | gcccagagac ccggcaccag cggctcccaa aatggcgatg acaccggcac ctggcccaac |
| 2521 | aaccagtttg acacagagat gctgcaagcc atgatcttgg cgtccgccag tgaagctgct |
| 2581 | gatgggagct ccaccctggg agggggtgcc ggcaccatgg gattgagcgc ccgctacgga |
| 2641 | ccccagttca ccctgcagca cgtgcccgac taccgccaga atgtctacat cccaggcagc |
| 2701 | aatgccacac tgaccaacgc agctggcaag cgggatggca aggccccagc aggtggcaat |
| 2761 | ggcaacaaga agaagtcggg caagaaggag aagaagtaac atggaggcca ggccaagagc |
| 2821 | cacagggcgg cctctcccca accagcccag cttctcctta cctgcaccca ggcctcagag |
| 2881 | tttcagggct aacccccaga atactggtag gggccaaggc catgctcccc ttgggaaaca |
| 2941 | gaaacaagtg cccagtcagc acctacccct tcccccccag ggggttgaat atgcaaaagc |
| 3001 | agttccgctg ggaaccccca tccaatcaac tgctgtaccc atgggggtag tggggttact |
| 3061 | gtagacacca agaaccattt gccacacccc gtttagttac agctgaactc ctccatcttc |
| 3121 | caaatcaatc aggcccatcc atcccatgcc tccctcctcc ccaccccact ccaacagttc |
| 3181 | ctctttcccg agtaaggtgg ttggggtgtt gaagtaccaa gtaacctaca agcctcctag |
| 3241 | ttctgaaaag ttggaagggc atcatgacct cttggcctct cctttgattc tcaatcttcc |
| 3301 | cccaaagcat ggtttggtgc cagccccttc acctccttcc agagcccaag atcaatgctc |
| 3361 | aagttttgga ggacatgatc accatcccca tggtactgat gcttgctgga tttagggagg |
| 3421 | gcattttgct accaagcctc ttcccaacgc cctggggacc agtcttctgt tttgtttttc |
| 3481 | attgtttgac gtttccactg catgccttga cttcccccac ctcctcctca aacaagagac |
| 3541 | tccactgcat gttccaagac agtatggggt ggtaagataa ggaagggaag tgtgtggatg |
| 3601 | tggatggtgg gggcatggac aaagcttgac acatcaagtt atcaaggcct tggaggaggc |
| 3661 | tctgtatgtc ctcaggggac tgacaacatc ctccagattc cagccataaa ccaataacta |
| 3721 | ggctggaccc ttcccactac ataatagggc tcagcccagg cagccagctt tgggctgagc |
| 3781 | taacaggacc aatggattaa actggcattt cagtccaagg aagctcgaag caggtttagg |
| 3841 | accaggtccc cttgagaggt cagaggggcc tctgtgggtg ctgggtactc cagaggtgcc |
| 3901 | actggtggaa gggtcagcgg agccccagca ggaagggtgg gccagccagg ccattcttag |
| 3961 | tccctgggtt ggggaggcag ggagctaggg cagggaccaa atgaacagaa agtctcagcc |
| 4021 | caggatgggg cttcttcaac agggcccctg ccctcctgaa gcctcagtcc ttcaccttgc |
| 4081 | caggtgccgt ttctcttccg tgaaggccac tgcccaggtc cccagtgcgc cccctagtgg |
| 4141 | ccatagcctg gttaaagttc cccagtgcct ccttgtgcat agaccttctt ctcccacccc |
| 4201 | cttctgcccc tgggtccccg gccatccagc ggggctgcca gagaacccca gacctgccct |
| 4261 | tacagtagtg tagcgccccc tccctctttc ggctggtgta gaatagccag tagtgtagtg |
| 4321 | cggtgtgctt ttacgtgatg gcgggtgggc agcgggcggc gggctccgcg cagccgtctg |
| 4381 | tccttgatct gcccgcggcg gcccgtgttg tgttttgtgc tgtgtccacg cgctaaggcg |
| 4441 | accccctccc ccgtactgac ttctcctata agcgcttctc ttcgcatagt cacgtagctc |
| 4501 | ccaccccacc ctcttcctgt gtctcacgca agttttatac tctaatattt atatggcttt |
| 4561 | ttttcttcga caaaaaaata ataaaacgtt tcttctgaaa agctg |

[0311] An exemplary human PCDHGB1 amino acid sequence is set forth below (SEQ ID NO: 75; GenBank Accession No: AAI03929.1, Version 1, incorporated herein by reference):

| | |
|---|---|
| 1 | mqrareaemm ksqvlfpfll slfcgaisqq irytipeela ngsrvgklak dlglsvrelp |
| 61 | trklrvsaed yfnvslesgd llvngridre kicgrkleca lefetvaenp mnvfhvvvvi |
| 121 | qdindnaprf vakgidleic esalpgvkfs ldsaqdadve gnslklytin pnqyfslstk |
| 181 | espdgskypv lllekpldre hqsshrlilt amdggdppls gtthiwirvt dandnapvfs |
| 241 | qevyrvslqe nvpwgtsvlr vmatdqdegi naeityafln spistslfnl npntgdittn |
| 301 | gtldfeetsr yvlsveakdg gvhtahcnvq ieivdendna pevtfmsfsn qipedsdlgt |
| 361 | vialikvrdk dsgqngmvtc ytqeevpfkl estsknyykl viagalnreq tadynvtiia |
| 421 | tdkgkpalss rtsitlhisd indnapvfhq asyvvhvsen nppgasiaqv sasdpdlgpn |
| 481 | drvsysilas dleprellsy vsvspqsgvv faqrafdheq lrafeltlqa rdqgspalsa |
| 541 | nvslrvlvgd lndnaprvly palgpdgsal fdmvpraaep gylvtkvvav dadsghnawl |
| 601 | syhvlqasep glfslglrtg evrtaralgd rdaarqrllv avrdggqppl satatlhlif |
| 661 | adslqevlpd lsdrpepsdp qtelqfylvv alalisvlfl lavilaialr lrrsssldte |
| 721 | gcfqtglcsk sgpgvppnhs egtlpysynl ciashsakte fnslnltpem appqdllcdd |
| 781 | psmvvcasne dhkiaydpsl pshvsfckss |

[0312] An exemplary human PCDHGB1 nucleic acid sequence is set forth below (SEQ ID NO: 76; GenBank Accession No: NM_018922.2, Version 2, incorporated herein by reference):

| | |
|---|---|
| 1 | atgcagagag ccagagaagc cgaaatgatg aaaagtcagg tactgtttcc cttcctgctg |
| 61 | tctttgttct gcggggccat ctcccagcag atccgataca cgattccaga ggagctagcc |
| 121 | aacggctcac gggtggggaa acttgccaag gatctggggc tcagtgtccg ggagttgcca |
| 181 | actcgaaaac tgcgggttag tgcagaggat tatttcaacg ttagtttgga gagcggggat |
| 241 | ttgttagtga acggtaggat agatcgagag aagatttgcg gaaggaaact tgagtgtgca |
| 301 | ctagaattcg aaacggtcgc tgaaaaccca atgaatgttt tccacgtggt tgttgtaatc |
| 361 | caagatatta atgacaatgc accacgtttc gttgcaaaag gcattgactt agaaatttgt |
| 421 | gagtcagcct tacccggggt aaaattctct ctggattctg ctcaagatgc agatgtggaa |
| 481 | ggcaattcac tgaagttata caccatcaac cccaatcaat acttctctct gtcaacgaag |
| 541 | gaaagtcctg atggaagtaa atatccggta ttactgctgg aaaaacctct agacagggaa |
| 601 | catcagagct ctcatcgctt aatcctgact gccatggatg gcggggaccc gcctctaagc |
| 661 | ggcaccaccc atatctggat ccgagttacg gatgccaatg ataatgctcc cgtgtttagc |
| 721 | caggaggtat acagggttag cctccaagaa aacgtaccgt ggggaacctc cgtgctgcgg |
| 781 | gtgatggcca cagaccagga tgagggcatt aatgcagaga tcacctatgc cttcctcaat |
| 841 | tccccaataa gtaccagcct cttcaatctc aatccaaata ctggcgacat cacaaccaat |
| 901 | ggcacattgg attttgaaga gacaagtaga tatgtgttga gtgtggaagc taaggatgga |
| 961 | ggagtacaca cagctcactg taatgttcaa atagaaattg ttgacgagaa tgacaatgcc |
| 1021 | ccagaggtga cattcatgtc cttctctaac cagattccag aggattcaga ccttggaact |
| 1081 | gtaatagccc tcataaaagt gcgagacaag gattctgggc aaaatggcat ggtgacatgc |
| 1141 | tatactcagg aagaagttcc tttcaaatta gaatccacct cgaagaatta ttacaagctg |
| 1201 | gtgattgctg gagccctaaa ccgggagcag acagcagact acaacgtcac aatcatagcc |
| 1261 | accgacaagg gcaaaccagc cctttcctcc aggacaagca tcaccctgca catctccgac |
| 1321 | atcaacgaca atgcacctgt tttccatcag gcctcctatg tggtccacgt gtctgagaac |
| 1381 | aacccacctg gcgcctccat tgcacaagta agcgcctccg acccggattt gggacccaac |
| 1441 | ggcagagtct cctactctat tctggccagt gacctggagc cgcgggagct gttgtcctac |
| 1501 | gtgtccgtga gcccgcagag cggggtggtg ttcgcgcagc gcgccttcga ccacgagcag |
| 1561 | ctgcgcgcct tcgagctcac actgcaggcc agggaccagg gctcccccgc gctcagcgcc |
| 1621 | aacgtgagcc tgcgcgtgtt ggtgggcgac ctcaatgaca atgcgccacg ggtgctgtac |
| 1681 | cccgcgctgg ggcctgatgg ctccgccctc ttcgatatgg tgccacgcgc cgcagagccc |
| 1741 | ggctacctgg tgaccaaggt ggtggcggtg gacgcagact caggacacaa cgcttggctg |
| 1801 | tcctaccacg tgctgcaggc cagcgagccc gggctcttca gcctggggtt gcgcacgggt |
| 1861 | gaggtgcgca cagcgcgtgc cttgggcgac agggacgcgg cccgccagcg cctgctggtc |
| 1921 | gctgtgcgtg atggaggaca gccgccactc tccgccaccg ccacgctgca cctaatcttc |
| 1981 | gcggatagcc tgcaagaggt attgccagac ctcagcgacc gccctgagcc ctctgacccc |
| 2041 | cagacggaac tgcagtttta cctggttgtg gccttggcct tgatctcagt gctctttctc |
| 2101 | ctcgcggtga ttctagcgat cgccctgcgc ctgcgacgtt cctccagcct cgacactgag |
| 2161 | ggctgctttc aaaccggtct ctgctccaag tctgggcccg gggttcctcc caaccacagc |
| 2221 | gaggggactt tgccctattc ctacaatcta tgtattgcct ctcattctgc aaagacagag |
| 2281 | tttaattctc tcaacctgac accggaaatg gctccccctc aggatctgct gtgtgatgat |
| 2341 | ccttctatgg ttgtatgtgc cagtaatgaa gatcacaaaa tcgcttatga cccttctttg |
| 2401 | tcttcgcacc aagccccgcc caacacggac tggcgtttct ctcaggccca gagacccggc |
| 2461 | accagcggct cccaaaatgg cgatgacacc ggcacctggc ccaacaacca gtttgacaca |
| 2521 | gagatgctgc aagccatgat cttggcgtcc gccagtgaag ctgctgatgg gagctccacc |
| 2581 | ctgggagggg gtgccggcac catgggattg agcgcccgct acggacccca gttcaccctg |
| 2641 | cagcacgtgc ccgactaccg ccagaatgtc tacatcccag gcagcaatgc cacactgacc |
| 2701 | aacgcagctg gcaagcggga tggcaaggcc ccagcaggtg gcaatggcaa caagaagaag |
| 2761 | tcgggcaaga aggagaagaa gtaacatgga ggccaggcca agagccacag ggcggcctct |
| 2821 | ccccaaccag cccagcttct ccttacctgc acccaggcct cagagtttca gggctaaccc |
| 2881 | ccagaatact ggtaggggcc aaggccatgc tccccttggg aaacagaaac aagtgcccag |
| 2941 | tcagcaccta ccccttcccc cccagggggt tgaatatgca aaagcagttc cgctgggaac |
| 3001 | ccccatccaa tcaactgctg tacccatggg ggtagtgggg ttactgtaga caccaagaac |
| 3061 | catttgccac accccgttta gttacagctg aactcctcca tcttccaaat caatcaggcc |
| 3121 | catccatccc atgcctccct cctccccacc ccactccaac agttcctctt tcccgagtaa |
| 3181 | ggtggttggg gtgttgaagt accaagtaac ctacaagcct cctagttctg aaaagttgga |
| 3241 | agggcatcat gacctcttgg cctctccttt gattctcaat cttcccccaa agcatggttt |
| 3301 | ggtgccagcc ccttcacctc cttccagagc ccaagatcaa tgctcaagtt ttggaggaca |
| 3361 | tgatcaccat ccccatggta ctgatgcttg ctggatttag ggagggcatt ttgctaccaa |
| 3421 | gcctcttccc aacgccctgg ggaccagtct tctgttttgt ttttcattgt ttgacgtttc |
| 3481 | cactgcatgc cttgacttcc cccacctcct cctcaaacaa gagactccac tgcatgttcc |
| 3541 | aagacagtat ggggtggtaa gataaggaag ggaagtgtgt ggatgtggat ggtgggggca |
| 3601 | tggacaaagc ttgacacatc aagttatcaa ggccttggag gaggctctgt atgtcctcag |
| 3661 | gggactgaca acatcctcca gattccagcc ataaaccaat aactaggctg gacccttccc |
| 3721 | actacataat agggctcagc ccaggcagcc agctttgggc tgagctaaca ggaccaatgg |
| 3781 | attaaactgg catttcagtc caaggaagct cgaagcaggt ttaggaccag gtccccttga |
| 3841 | gaggtcagag gggcctctgt gggtgctggg tactccagag gtgccactgg tggaagggtc |
| 3901 | agcggagccc cagcaggaag ggtgggccag ccaggccatt cttagtccct gggttgggga |
| 3961 | ggcagggagc tagggcaggg accaaatgaa cagaaagtct cagcccagga tggggcttct |
| 4021 | tcaacagggc ccctgccctc ctgaagcctc agtccttcac cttgccaggt gccgtttctc |
| 4081 | ttccgtgaag gccactgccc aggtccccag tgcgccccct agtggccata gcctggttaa |
| 4141 | agttccccag tgcctccttg tgcatagacc ttcttctccc acccccttct gcccctgggt |
| 4201 | ccccggccat ccagcggggc tgccagagaa ccccagacct gcccttacag tagtgtagcg |
| 4261 | ccccctccct ctttcggctg gtgtagaata gccagtagtg tagtgcggtg tgcttttacg |
| 4321 | tgatggcggg tgggcagcgg gcggcgggct ccgcgcagcc gtctgtcctt gatctgcccg |
| 4381 | cggcggcccg tgttgtgttt tgtgctgtgt ccacgcgcta aggcgacccc ctcccccgta |
| 4441 | ctgacttctc ctataagcgc ttctcttcgc atagtcacgt agctcccacc ccaccctctt |
| 4501 | cctgtgtctc acgcaagttt tatactctaa tatttatatg gctttttttc ttcgacaaaa |
| 4561 | aaataataaa acgtttcttc tgaaaagctg |

[0313] An exemplary human PCDHGB2 amino acid sequence is set forth below (SEQ ID NO: 77; GenBank Accession No: AAI01806.1, Version 1, incorporated herein by reference):

| | |
|---|---|
| 1 | mkassgrcgl vrwlqvllpf llslfpgalp vqirysipee laknsvvgnl akdlglsvrd |
| 61 | lparklrvsa ekeyftvnpe sgdllvsdri dreqicgkqp lcvldfdtva enplnifyia |
| 121 | vivqdindnt plfkqtkinl kigestkpgt tfpldpalds dvgpnslqry hlndneyfdl |
| 181 | aekqtpdgrk ypelilkhsl dreehslhql vltavdggdp pgsgttqiri kvtdandnpp |
| 241 | vfsqdvyrvt lredvppgff vlqvtatdrd eginaeitys fhnvdeqvkh ffnlnektge |
| 301 | ittkddldfe iassytlsie akdpgdlaah csiqveildd ndcapevivt svstplpeds |
| 361 | ppgtvialik trdrdsgeng evycqvlgna kfilkssskn yyklvtdgal dreeipeynl |
| 421 | titatdggkp plsssiivtl hisdvndnap vfqqtsymvh vaennppgas iaqisasdpd |
| 481 | lgpsgqvsys ivasdlkpre ilsyvsvsaq sgvvfaqraf dheqlrafel tlqardqgsp |
| 541 | alsanvslrv lvgdlndnap rvlypalgpd gsalfdmvpr aaepgylvtk vvavdadsgh |
| 601 | nawlsyhvlq asepglfslg lrtgevrtar algdrdaarq rllvavrdgg qpplsatatl |
| 661 | hlifadslqe vlpdlsdrre psdpqaklqf ylvvalalis vlfflavila islrlrlssr |
| 721 | sdawdcfqpg lsskpgpgvl pnysegtlpy synlcvasqs aktefnflni tpelvpaqdl |
| 781 | vcdnasweqn tnhgaagvpf asdtilkvsf n |

[0314] An exemplary human PCDHGB2 nucleic acid sequence is set forth below (SEQ ID NO: 78; GenBank Accession No: NM_018923.2, Version 2, incorporated herein by reference):

| | |
|---|---|
| 1 | atgaaagcga gctcagggag gtgcgggctg gtgcggtggc tgcaggtact gttgcccttc |
| 61 | ctgttgtctt tgttccccgg ggctctccca gtccagatcc gctattcaat tccagaggag |
| 121 | ctggccaaaa actcggtcgt aggaaacctc gccaaggatc tggggctcag cgtccgggac |
| 181 | ttgccagccc ggaagctgcg ggttagcgcg gagaaggaat atttcacagt aaacccagaa |
| 241 | agcggagact tacttgtgag tgacagaata gaccgagaac agatatgcgg gaagcagcct |
| 301 | ctgtgtgttc tggatttcga tactgtcgct gaaaatccac taaatatttt ctacatagca |
| 361 | gtaattgtgc aggatataaa tgataatacc ccgctattca aacagactaa gattaattta |
| 421 | aaaattggcg aatccactaa gccaggtaca acatttccac ttgacccagc cctggattca |
| 481 | gatgttggtc ctaactcact acaaagatac caccttaatg acaacgagta ctttgatctc |
| 541 | gctgagaaac agactccaga tggtcgtaaa tatcctgagt tgattctaaa acactctctg |
| 601 | gacagagaag agcacagttt acatcaattg gtcctcacag ctgtggatgg cggagaccca |
| 661 | cctcaaagtg gcacgaccca aatccgaatc aaagtcacgg atgccaacga taaccctcca |
| 721 | gtgttcagcc aggacgtgta cagggtcacc ctgagggagg acgtgccgcc gggcttcttt |
| 781 | gtgcttcaag tgacagccac cgaccgggat gaaggcataa acgcagagat cacctactcc |
| 841 | tttcataatg tggacgaaca agtgaaacac tttttcaact taaatgaaaa aacaggagaa |
| 901 | atcacgacaa aggatgattt ggattttgag attgcaagta gttacactct gagtatcgaa |
| 961 | gcaaaagatc ctggagatct agcagcccac tgcagtatcc aagttgaaat tcttgatgac |
| 1021 | aacgattgtg cacctgaagt tattgtgact tcagtatcta ctcccctacc ggaggattcg |
| 1081 | ccaccaggaa cagtgatcgc cttgataaaa acgagagaca gagactctgg agaaaatgga |
| 1141 | gaagtttact gccaagtgtt gggaaatgcc aagtttattt tgaaatcttc ctcaaagaac |
| 1201 | tattacaaac tagtgacaga cggcgctctg gaccgggagg agatcccaga atacaatctc |
| 1261 | accatcacag ccaccgacgg gggcaagccg cccctctcct ccagcataat tgtcaccctg |
| 1321 | cacatctccg acgtcaacga taatgcccca gttttccaac agacttccta catggttcac |
| 1381 | gtggcagaga acaatcctcc tggcgcctct atcgctcaaa tcagtgcctc tgaccctgac |
| 1441 | ttgggcccca gtggccaagt ttcctactcc atcgtagcga gcgacctgaa gccgcgggag |
| 1501 | attttatcct acgtgtccgt gagcgcgcag agcggggtgg tgttcgcgca gcgcgccttc |
| 1561 | gatcatgagc agctgcgcgc cttcgagctc acactgcagg cccgcgacca gggctcgccc |
| 1621 | gcgctcagcg ccaacgtgag cctgcgcgtg ttagtgggcg acctcaatga caatgcgcca |
| 1681 | cgggtgctgt accccgcgct ggggcctgat ggctccgccc tcttcgatat ggtgccacgc |
| 1741 | gccgcagagc ccggctacct ggtgaccaag gtggtggcgg tggacgcaga ctcaggacac |
| 1801 | aacgcttggc tgtcctacca cgtgctgcag gccagcgagc ccgggctctt cagcctgggg |
| 1861 | ttgcgcacgg gtgaggtgcg cacagcgcgt gccttgggcg acagggacgc ggcccgccag |
| 1921 | cgcctgctgg tcgctgtgcg tgatggagga cagccgccac tctccgctac ggccacgctg |
| 1981 | cacctaatct tcgcggatag cctgcaagag gtattgccag acctcagcga ccgccgggag |
| 2041 | ccctctgacc cccaggcaaa actgcagttt tacctggttg tggccttggc cttgatctca |
| 2101 | gtgctcttct tcctcgcggt gattctggca atctccctgc gcctgcgact ctcttccagg |
| 2161 | tcagatgctt gggactgttt tcagcctggt ctcagctcca agcctggacc tggggttctc |
| 2221 | cccaattaca gtgagggtac attgccctat tcctacaacc tgtgtgttgc ctcacaatca |
| 2281 | gccaagacag agttcaattt tctgaacata accccggaat tggttcccgc gcaagatctc |
| 2341 | gtctgtgaca atgcctcttg ggaacaaaat acaaatcatg gagccgctgg ggtccctttt |
| 2401 | gcctcagata ctattttgaa gcaagccccg cccaacacgg actggcgttt ctctcaggcc |
| 2461 | cagagacccg gcaccagcgg ctcccaaaat ggcgatgaca ccggcacctg gcccaacaac |
| 2521 | cagtttgaca cagagatgct gcaagccatg atcttggcgt ccgccagtga agctgctgat |
| 2581 | gggagctcca ccctgggagg gggtgccggc accatgggat tgagcgcccg ctacggaccc |
| 2641 | cagttcaccc tgcagcacgt gcccgactac cgccagaatg tctacatccc aggcagcaat |
| 2701 | gccacactga ccaacgcagc tggcaagcgg gatggcaagg ccccagcagg tggcaatggc |
| 2761 | aacaagaaga agtcgggcaa gaaggagaag aagtaacatg gaggccaggc caagagccac |
| 2821 | agggcggcct ctccccaacc agcccagctt ctccttacct gcacccaggc ctcagagttt |
| 2881 | cagggctaac ccccagaata ctggtagggg ccaaggccat gctccccttg ggaaacagaa |
| 2941 | acaagtgccc agtcagcacc taccccttcc cccccagggg gttgaatatg caaaagcagt |
| 3001 | tccgctggga acccccatcc aatcaactgc tgtacccatg ggggtagtgg ggttactgta |
| 3061 | gacaccaaga accatttgcc acaccccgtt tagttacagc tgaactcctc catcttccaa |
| 3121 | atcaatcagg cccatccatc ccatgcctcc ctcctcccca ccccactcca acagttcctc |
| 3181 | tttcccgagt aaggtggttg gggtgttgaa gtaccaagta acctacaagc ctcctagttc |
| 3241 | tgaaaagttg gaagggcatc atgacctctt ggcctctcct ttgattctca atcttccccc |
| 3301 | aaagcatggt ttggtgccag ccccttcacc tccttccaga gcccaagatc aatgctcaag |
| 3361 | ttttggagga catgatcacc atccccatgg tactgatgct tgctggattt agggagggca |
| 3421 | ttttgctacc aagcctcttc ccaacgccct ggggaccagt cttctgtttt gtttttcatt |
| 3481 | gtttgacgtt tccactgcat gccttgactt cccccacctc ctcctcaaac aagagactcc |
| 3541 | actgcatgtt ccaagacagt atggggtggt aagataagga agggaagtgt gtggatgtgg |
| 3601 | atggtggggg catggacaaa gcttgacaca tcaagttatc aaggccttgg aggaggctct |
| 3661 | gtatgtcctc aggggactga caacatcctc cagattccag ccataaacca ataactaggc |
| 3721 | tggacccttc ccactacata atagggctca gcccaggcag ccagctttgg gctgagctaa |
| 3781 | caggaccaat ggattaaact ggcatttcag tccaaggaag ctcgaagcag gtttaggacc |
| 3841 | aggtcccctt gagaggtcag aggggcctct gtgggtgctg ggtactccag aggtgccact |
| 3901 | ggtggaaggg tcagcggagc cccagcagga agggtgggcc agccaggcca ttcttagtcc |
| 3961 | ctgggttggg gaggcaggga gctagggcag ggaccaaatg aacagaaagt ctcagcccag |
| 4021 | gatggggctt cttcaacagg gcccctgccc tcctgaagcc tcagtccttc accttgccag |
| 4081 | gtgccgtttc tcttccgtga aggccactgc ccaggtcccc agtgcgcccc ctagtggcca |
| 4141 | tagcctggtt aaagttcccc agtgcctcct tgtgcataga ccttcttctc ccaccccctt |
| 4201 | ctgcccctgg gtccccggcc atccagcggg gctgccagag aaccccagac ctgcccttac |
| 4261 | agtagtgtag cgccccctcc ctctttcggc tggtgtagaa tagccagtag tgtagtgcgg |
| 4321 | tgtgctttta cgtgatggcg ggtgggcagc gggcggcggg ctccgcgcag ccgtctgtcc |
| 4381 | ttgatctgcc cgcggcggcc cgtgttgtgt tttgtgctgt gtccacgcgc taaggcgacc |
| 4441 | ccctcccccg tactgacttc tcctataagc gcttctcttc gcatagtcac gtagctccca |
| 4501 | ccccaccctc ttcctgtgtc tcacgcaagt tttatactct aatatttata tggctttttt |
| 4561 | tcttcgacaa aaaaataata aaacgtttct tctgaaaagc tg |

[0315] An exemplary human EMILIN1 amino acid sequence is set forth below (SEQ ID NO: 79; GenBank Accession No: AAH07530.1, Version 1, incorporated herein by reference):

| | |
|---|---|
| 1 | madlgatkdr iiseinrlqq eatehatese erfrgleegq aqagqcpsle grlgrlegvc |
| 61 | erldtvaggl qglreglsrh vaglwaglre tnttsqmqaa lleklvggqa glgrrlgaln |
| 121 | sslqlledrl hqlslkdltg egtkgpagea gppgppglqg ppgpagppgs pgkdgqegpi |
| 181 | gppgpqgeqg vegapaapvp qvafsaalsl prsepgtvpf drvllndggy ydpetgvfta |
| 241 | plagryllsa vltghrhekv eavlsrsnqg varvdsggye peglenkpva esqpspgtlg |
| 301 | vfslilplqa gdtvcvdlvm gqlahseepl tifsgallyg dpeleha |

[0316] An exemplary human EMILIN1 nucleic acid sequence is set forth below (SEQ ID NO: 80; GenBank Accession No: NM_007046.3, Version 3, incorporated herein by reference):

| | |
|---|---|
| 1 | gggaggggag ccagcaggga ggaggaggcc agggcccgcc ccacagccac tctcgcgcct |
| 61 | ccgaacagcc acaggggcaa agccctgtca cccccaggat ccggtcatca gggaaagagg |
| 121 | acagggagac cagaagaggg ccagctggga cgagggggcg gacgcccagg aggcaacttc |
| 181 | tgagacgcag ctcctgagag gggcagggac caggcgcggg aggccagagg gggcacagag |
| 241 | aacaaacccc ctcagaagtg aagaggagag cggaaggaac cgagagggga cggacaggag |
| 301 | ctgaggagga aagaggaggg gagaggggtc aggccaggca gccaaggaga agacgtgtgg |
| 361 | ccgggggcta tcagaaggaa actgggacgg acgggccggg ctcgggctgt cctgtggagc |
| 421 | agcagcatcc ccggggccgg cagaggcgcc agtggctggg cgggatgagt ctctgagggc |
| 481 | cactgtggag cgccccgcca tggccccccg caccctctgg agctgctacc tctgctgcct |
| 541 | gctgacggca gctgcagggg ccgccagcta ccctcctcga ggtttcagcc tctacacagg |
| 601 | ttccagtggg gccctcagcc ccggggggcc ccaggcccag attgcccccc ggccagccag |
| 661 | ccgccacagg aactggtgtg cctacgtggt gacccggaca gtgagctgtg tccttgagga |
| 721 | tggagtggag acatatgtca agtaccagcc ttgtgcctgg ggccagcccc agtgtcccca |
| 781 | aagcatcatg taccgccgct tcctccgccc tcgctaccgt gtggcctaca agacagtgac |
| 841 | cgacatggag tggaggtgct gtcagggtta tgggggcgat gactgtgctg agagtcccgc |
| 901 | tccagcgctg gggcctgcgt cttccacacc acggcccctg gcccggcctg cccgccccaa |
| 961 | cctctctggc tccagtgcag gcagccccct cagtggactg gggggagaag gtcctgggga |
| 1021 | gtcagagaag gtgcagcagc tggaggaaca ggtgcagagc ctgaccaagg agctgcaagg |
| 1081 | cctgcggggc gtcctgcaag gactgagcgg gcgcctggca gaggatgtgc agagggctgt |
| 1141 | ggagacggcc ttcaacggga ggcagcagcc agctgacgcg gctgcccgcc ctggggtgca |
| 1201 | tgaaaccctc aatgagatcc agcaccagct gcagctcctg gacacccgcg tctccaccca |
| 1261 | cgaccaggag ctgggtcacc tcaacaacca tcatggcggc agcagcagca gtgggggcag |
| 1321 | cagggcccca gccccagcct cagcccctcc gggccccagt gaggagctgc tgcggcagct |
| 1381 | ggagcagcgg ttgcaggagt cctgctccgt gtgcctggcc gggctagatg gcttccgccg |
| 1441 | gcagcagcag gaggacaggg agcggctgcg agcgatggag aagctgctgg cctcggtgga |
| 1501 | ggagcggcaa cggcacctcg cagggctggc ggtgggccgc aggccccctc aggaatgctg |
| 1561 | ctctccagag ctgggccggc gactggcaga gctggagcgc aggctggatg tcgtggccgg |
| 1621 | ctcagtgaca gtgctgagtg ggcggcgagg cacagagctg ggaggagccg cggggcaggg |
| 1681 | aggccacccc ccaggctaca ccagcttggc ctcccgcctg tctcgcctgg aggaccgctt |
| 1741 | caactccacc ctgggccctt cggaggagca ggaggagagc tggcctgggg ctcctggggg |
| 1801 | gctgagccac tggctgcctg ctgcccgggg ccgactagag cagttggggg ggctgctggc |
| 1861 | caatgtgagc ggggagctgg gggggcggtt ggatctgttg gaggagcagg tggcaggggc |
| 1921 | catgcaggca tgcgggcagc tctgctctgg ggcccctggg gagcaggact ctcaagtcag |
| 1981 | cgagatcctc agtgccttgg agcgcagggt gctggacagt gaggggcagc tgcggctggt |
| 2041 | gggctccggc ctgcacacgg tggaagcagc gggggaggcc cggcaggcca cgctggaggg |
| 2101 | attacaagag gttgtgggcc ggctccagga tcgtgtggat gcccaggatg agacagctgc |
| 2161 | agagttcaca ctacggctga atctcactgc ggcccggcta ggccaactgg aggggctgct |
| 2221 | gcaggcccat ggggatgagg gctgtggggc ctgtggcgga gtccaagagg aactaggccg |
| 2281 | ccttcgggat ggtgtggagc gctgctcctg ccccctgttg cctcctcggg gtcctggggc |
| 2341 | tggtccaggt gttgggggcc caagccgtgg gcccctggac ggcttcagcg tgtttggggg |
| 2401 | cagctcaggc tcagccctgc aggccctgca aggagagctc tctgaggtta ttctcagctt |
| 2461 | cagctccctc aatgactcac tgaatgagct ccagaccact gtggagggcc agggcgctga |
| 2521 | tctggctgac ctgggggcaa ccaaggaccg tatcatttct gagattaaca ggctgcagca |
| 2581 | ggaggccaca gagcatgcta cagagagtga agagcgcttc cgaggcctag aggagggaca |
| 2641 | agcacaggcc ggccagtgcc ccagcttaga ggggcgattg ggccgtcttg agggtgtctg |
| 2701 | tgaacggttg gacactgtgg ctgggggact gcagggcctg cgcgagggcc tttccagaca |
| 2761 | cgtggctggg ctctgggctg ggctccggga aaccaacacc accagccaga tgcaggcagc |
| 2821 | cctgctggag aagctggtcg ggggacaggc gggcctgggc aggcggctgg gtgcccttaa |
| 2881 | cagctccctg cagctcctgg aggaccgtct gcaccagctc agcctgaagg acctcactgg |
| 2941 | gcctgcagga gaggctgggc ccccagggcc tcctgggctg cagggacccc caggccctgc |
| 3001 | tggacctcca ggatcaccag gcaaggacgg gcaagagggc cccatcgggc caccaggtcc |
| 3061 | tcaaggtgaa cagggagtgg agggggcacc agcagcccct gtgccccaag tggcattttc |
| 3121 | agctgctctg agtttgcccc ggtctgaacc aggcacggtc cccttcgaca gagtcctgct |
| 3181 | caatgatgga ggctattatg atccagagac aggcgtgttc acagcgccac tggctggacg |
| 3241 | ctacttgctg agcgcggtgc tgactgggca ccggcacgag aaagtggagg ccgtgctgtc |
| 3301 | ccgctccaac cagggcgtgg cccgcgtaga ctccggtggc tacgagcctg agggcctgga |
| 3361 | gaataagccg gtggccgaga gccagcccag cccgggcacc ctgggcgtct tcagcctcat |
| 3421 | cctgccgctg caggccgggg acacggtctg cgtcgacctg gtcatggggc agctggcgca |
| 3481 | ctcggaggag ccgctcacca tcttcagcgg ggccctgctc tatggggacc cagagcttga |
| 3541 | acacgcgtag actggggtcc cgcccgacgt gtctacgtcg gctgaagaga cagcgggggc |
| 3601 | ggcgggctcc tggggtctcg cctgagacgg ggcacctagc cctgggcgag cgccgcaccc |
| 3661 | gggcccgcag cggcaccgcg cccagagcgg cctctcccca cgcccggggc gcgccggctc |
| 3721 | agggaggctc ggggccgccc atgcagactt ttggcctggc gcgatccccc aagaacccct |
| 3781 | ccagggccgg cctgcggagg agccgatcct cgcaccctcc gctccctcca ctggccctcc |
| 3841 | aggtcgattc cctgggctcc aggctccccc gcgcgggcgc cgcccaccgc catactaaac |
| 3901 | gatcgaggaa taaagacact tggtttttct aaaaaaaaaa aaaaaaaaaa aaaaaaaaa |

[0317] An exemplary human TNN amino acid sequence is set forth below (SEQ ID NO: 81; GenBank Accession No: AAI36620.1, Version 1, incorporated herein by reference):

| | |
|---|---|
| 1 | mslqemfrfp mglllgsvll vasapatlep pgcsnkeqqv tvshtykidv pksalvqvda |
| 61 | dpqplsddga sllalgeare eqniifrhni rlqtpqkdce lagsvqdlla rvkkleeemv |
| 121 | emkeqcsaqr ccqgvtdlsr hcsghgtfsl etcschceeg regpacerla cpgacsghgr |
| 181 | cvdgrclche pyvgadcgyp acpencsghg ecvrgvcqch edfmsedcse krcpgdcsgh |
| 241 | gfcdtgecyc eegftgldca qvvtpqglql lkntedsllv swepssqvdh yllsyyplgk |
| 301 | elsgkqiqvp keqhsyeilg llpgtkyivt lrnvknevss spqhllattd lavlgtawvt |
| 361 | detensldve wenpstevdy yklrygpmtg qevaevtvpk ssdpksrydi tglhpgteyk |
| 421 | itvvpmrgel egkpillngr teidsptnvv tdrvtedtat vswdpvqavi dkyvvrytsa |
| 481 | dgdtkemavh kdesstvltg lkpgeaykvy vwaergnqgs kkadtnalte idspanlvtd |
| 541 | rvtentatis wdpvqatidk yvvrytsadd qetrevlvgk eqsstvltgl rpgveytvhv |
| 601 | waqkgdresk kadtnaptdi dspknlvtdr vtenmatvsw dpvqaaidky vvrytsagge |
| 661 | trevpvgkeq sstvltglrp gmeymvhvwa qkgdqeskka dtkaqtdids pqnlvtdrvt |
| 721 | enmatvswdp vratidryvv rytsakdget revpvgkeqs stvltglrpg veytvhvwaq |
| 781 | kgaqeskkad tkaqtdidsp qnlvtdwvte ntatvswdpv qatidryvvh ytsangetre |
| 841 | vpvgkeqsst vltglrpgme ytvhvwaqkg nqeskkadtk aqteidgpkn lvtdwvtenm |
| 901 | atvswdpvqa tidkymvryt sadgetrevp vgkehsstvl tglrpgmeym vhvwaqkgaq |
| 961 | eskkadtkaq teldpprnlr psavtqsggi ltwtppsaqi hgyiltyqfp dgtvkemqlg |
| 1021 | redqrfalqg leqgatypvs lvafkggrrs rnvsttlstv garfphpsdc sqvqqnsnaa |
| 1081 | sglytiylhg dasrplqvyc dmetdgggwi vfqrrntgql dffkrwrsyv egfgdpmkef |
| 1141 | wlgldklhnl ttgtparyev rvdlqtanes ayaiydffqv asskeryklt vgkyrgtagd |
| 1201 | altyhngwkf ttfdrdndia lsncalthhg gwwyknchla npngrygetk hsegvnwepw |
| 1261 | kghefsipyv elkirphgys repvlgrkkr tlrgrlrtf |

[0318] An exemplary human TNN nucleic acid sequence is set forth below (SEQ ID NO: 82; GenBank Accession No: NM_022093.1, Version 1, incorporated herein by reference):

| | |
|---|---|
| 1 | aagtaccaag gtctgcggca ggaggagacc ggctcacagg agcagcagca ttggaagagg |
| 61 | cacccagcag cctcccaggc atcctggagg gtctgctccc tgtctttcca aggatgagtc |
| 121 | tccaggagat gttccgcttc cctatggggc tcctgcttgg ctctgtgctc ctggtggctt |
| 181 | cggccccagc cactctggag cctcccggct gcagcaacaa ggagcaacag gtcactgtca |
| 241 | gccacaccta caagatcgat gtgcccaagt ctgccttggt tcaggttgac gctgaccctc |
| 301 | agcccctcag tgacgatggg gcttcgctct tggccctggg ggaggccagg gaggaacaga |
| 361 | acatcatctt caggcacaac atccgccttc agacgccaca gaaggactgc gagttggcag |
| 421 | gcagtgtcca ggacctcctg gcccgggtga agaagctgga ggaagagatg gtggagatga |
| 481 | aggaacagtg tagtgcccag cgctgctgcc agggagtcac tgatctaagc cgccactgca |
| 541 | gcggccacgg gaccttctcc ctggagacct gcagctgcca ctgcgaagag ggcagggagg |
| 601 | gccccgcctg cgagcggctg gcctgccccg gggcgtgcag cggccacggg cgttgcgtgg |
| 661 | acgggcgctg cctgtgccat gagccctacg tgggtgccga ctgcggctac ccggcctgcc |
| 721 | ctgagaactg cagcggacac ggcgagtgcg tgcgcggcgt gtgccagtgc cacgaagact |
| 781 | tcatgtcgga ggactgcagc gagaagcgct gtcccggcga ctgcagcggc cacggcttct |
| 841 | gtgacacggg cgagtgctac tgcgaggagg gcttcacagg cctggactgt gcccaggtgg |
| 901 | tcaccccaca gggcctgcag ctgctcaaga acacggagga ttctctgctg gtgagctggg |
| 961 | agccctccag ccaggtggat cactacctcc tcagctacta ccccctgggg aaggagctct |
| 1021 | ctgggaagca gatccaagtg cccaaggagc agcacagcta tgagattctt ggtttgctgc |
| 1081 | ctggaaccaa gtacatagtc accctgcgta acgtcaagaa tgaagtttct agcagcccac |
| 1141 | agcatctact tgccaccaca gaccttgctg tgcttggcac tgcctgggtg acagatgaga |
| 1201 | ctgagaactc ccttgacgtg gagtgggaaa acccctcaac tgaggtggac tactacaagc |
| 1261 | tgcgatatgg ccccatgaca ggacaggagg tagctgaggt cactgtgccc aagagcagtg |
| 1321 | accccaagag ccgatatgac atcactggtc tgcacccggg gactgagtat aagatcacgg |
| 1381 | tggtgcccat gagaggagag ctggagggca agccgatcct cctgaatggc aggacagaaa |
| 1441 | ttgacagtcc aaccaatgtt gtcactgatc gagtgactga agacacagca actgtctcct |
| 1501 | gggacccagt gcaggctgtc atagacaagt atgtagtgcg ctacacttct gctgatgggg |
| 1561 | acaccaagga aatggcagtg cacaaggatg agagcagcac tgtcctgacg ggcctgaagc |
| 1621 | caggagaggc atacaaggtc tacgtgtggg ctgaaagggg caaccagggg agcaagaaag |
| 1681 | ctgacaccaa tgccctcaca gaaattgaca gcccagcaaa cctggtgact gaccgggtga |
| 1741 | ctgagaatac cgccaccatc tcctgggacc cggtacaggc caccattgac aagtacgtgg |
| 1801 | tgcgctacac ctctgctgac gaccaagaga ccagagaggt tctggtgggg aaggagcaga |
| 1861 | gcagcactgt cctgacaggc ctgaggccag gtgtggagta cacagtgcat gtctgggccc |
| 1921 | agaaggggga ccgagagagc aagaaggctg acaccaacgc cccgacagat attgacagcc |
| 1981 | ccaaaaacct ggtgactgac cgggtgacag agaatatggc cacggtctcc tgggacccgg |
| 2041 | tgcaggccgc cattgacaag tacgtggtgc gctacacctc tgctggtgga gagaccaggg |
| 2101 | aggttccggt ggggaaggag cagagcagca cagtcctgac aggcctgaga ccgggtatgg |
| 2161 | agtacatggt gcacgtgtgg gcccagaagg gggaccagga gagcaagaag gccgacacca |
| 2221 | aggcccagac agacattgac agcccccaaa acctggtgac cgaccgggtg acagagaata |
| 2281 | tggccactgt ctcctgggac ccggtgcggg ccaccattga caggtatgtg gtgcgctaca |
| 2341 | cctctgccaa ggacggagag accagggagg ttccggtggg gaaggagcag agtagcactg |
| 2401 | tcctgacggg cctgaggccg ggtgtggagt acacggtgca cgtgtgggcc cagaaggggg |
| 2461 | cccaggagag caagaaggct gacaccaagg cccagacaga cattgacagc ccccaaaacc |
| 2521 | tggtcactga ctgggtgaca gagaatacag ccactgtctc ctgggacccg gtgcaggcca |
| 2581 | ccattgacag gtatgtggtg cactacacgt ctgccaacgg agagaccagg gaggttccag |
| 2641 | tggggaagga gcagagcagc actgtcctga cgggcctgag gccgggcatg gagtacacgg |
| 2701 | tgcacgtgtg ggcccagaag gggaaccagg agagcaagaa ggctgacacc aaggcccaga |
| 2761 | cagaaattga cggccccaaa aacctagtga ctgactgggt gacggagaat atggccactg |
| 2821 | tctcctggga cccggttcag gccaccattg acaagtacat ggtgcgctac acctctgctg |
| 2881 | acggagagac cagggaggtt ccggtgggga aggagcacag cagcactgtc ctgacgggcc |
| 2941 | tgagaccagg catggagtac atggtgcacg tgtgggccca gaagggggcc caggagagca |
| 3001 | agaaggctga caccaaggcc cagacagaac tcgaccctcc cagaaacctt cgtccatctg |
| 3061 | ctgtaacgca gtctggtggc atattgacct ggacgccccc ctctgctcag atccacggct |
| 3121 | acattctgac ttaccagttc ccagatggca cagttaagga gatgcagctg ggacgggaag |
| 3181 | accagaggtt tgcgttgcaa ggccttgagc aaggcgccac ctaccctgtc tcccttgttg |
| 3241 | cctttaaggg tggtcgccgg agcagaaatg tatccaccac cctctccaca gttggtgccc |
| 3301 | gtttcccaca cccttcggac tgcagtcagg ttcagcagaa cagcaatgcc gccagtggtc |
| 3361 | tgtacaccat ctacctgcat ggcgatgcca gccggcccct gcaggtgtac tgtgacatgg |
| 3421 | aaacggacgg aggtggctgg attgtcttcc agaggcggaa cactgggcag ctggatttct |
| 3481 | tcaagcgatg gaggagctat gtggaaggct ttggggaccc catgaaggag ttctggcttg |
| 3541 | gacttgacaa gctacacaac ctcaccaccg gcactccagc gcggtatgag gtgagagtgg |
| 3601 | atttacagac tgccaatgaa tctgcctatg ctatatatga tttcttccaa gtggcctcca |
| 3661 | gcaaggagcg gtataagctg acagttggga aatacagagg cacggcaggg gatgctctta |
| 3721 | cttaccacaa tggatggaag tttacaactt ttgacagaga caatgatatc gcactcagca |
| 3781 | actgtgccct gacacatcat ggtggctggt ggtataagaa ctgccacttg gccaacccta |
| 3841 | atggcagata tggggagacc aagcacagtg agggggtgaa ctgggagcct tggaaaggac |
| 3901 | atgaattctc cattccttac gtggagttga aaatccgccc tcatggctac agcagggagc |
| 3961 | ctgtcctggg cagaaagaag cggacgctga gaggaaggct gcgaacgttc tgatggcccg |
| 4021 | tgtgagcagt cctcgcagga gacaccacca gctgtggcag cttggggcgg ggtgggtagt |
| 4081 | ggtcactgcg gtctgggagt gctcagatag cccgcagaac aaatcatgtc accaagcttc |
| 4141 | aagccatgga ggttccttcc ctctcacctg catttttgcc cgtctttatg agggtcttga |
| 4201 | aaatcaaaat agtagttgca cagtatgtgt aggaaagaca gtactggaac ggcaaggttt |
| 4261 | ctcagcttat cttcagcaac atatatactg gattagggca agagaaggaa tcacccagca |
| 4321 | cttcaccagt tggaaatctc tggaaattta catctatgta tttaaagttc tgctaatgca |
| 4381 | aatcttttct ctggaaagaa gcacagagga ggagttctga tgacccaggg gttagggctg |
| 4441 | agacaaccgg acgtttgtca cctcctttcc cattgggttt ttaggaaaac agtgtgaacc |
| 4501 | tccccctttt aatttctggt gttatgagga agaataaagg ggataaaagg ggctaagatg |
| 4561 | gactcatgtt tagctaagtt ctgacttgta tccagcatgc tggagaccaa agctgccgcc |
| 4621 | ttactgctat ttttaagtgc cctcttttca gtcatttgca taattgcgtc catagagctg |
| 4681 | catatgttgt gaataaattc tcactcattt caactttgaa taatttgact gtcttgataa |
| 4741 | ttggttcctc ccaaagactc ttctgcaact cccattcatg cccaccaggc ctcagactcc |
| 4801 | ctcttttccc cgccctgcac tattggagcc ctgggttttg tgggagtgct cagcaccgtg |
| 4861 | agtcttactg tttgatcgga cagttagcaa gatcagatcc tttttgctta ttttctatca |
| 4921 | ctttggaggg ttttctgtag caaaatcagt gaccaatgaa gtaacttaaa ttcctattga |
| 4981 | agaaaaaaaa taataaacca cttgattt |

[0319] An exemplary human miR-211 nucleic acid sequence is set forth below (SEQ ID NO: 83; GenBank Accession No: NR_029624.1, Version 1, incorporated herein by reference):

| | |
|---|---|
| 1 | tcacctggcc atgtgacttg tgggcttccc tttgtcatcc ttcgcctagg gctctgagca |
| 61 | gggcagggac agcaaagggg tgctcagttg tcacttccca cagcacggag |

[0320] An exemplary human CD5L amino acid sequence is set forth below (SEQ ID NO: 84; GenBank Accession No: AAQ88858.1, Version 1, incorporated herein by reference):

| | |
|---|---|
| 1 | mallfslila ictrpgflas psgvrlvggl hrcegrveve qkgqwgtvcd dgwdikdvav |
| 61 | lcrelgcgaa sgtpsgilye ppaekeqkvl iqsvsctgte dtlaqceqee vydcshdeda |
| 121 | gascenpess fspvpegvrl adgpghckgr vevkhqnqwy tvcqtgwslr aakvvcrqlg |
| 181 | cgravltqkr cnkhaygrkp iwlsqmscsg reatlqdcps gpwgkntcnh dedtwveced |
| 241 | pfdlrlvggd nlcsgrlevl hkgvwgsvcd dnwgekedqv vckqlgcgks lspsfrdrkc |
| 301 | ygpgvgriwl dnvrcsgeeq sleqcqhrfw gfhdcthqed vavicsv |

[0321] An exemplary human CD5L nucleic acid sequence is set forth below (SEQ ID NO: 85; GenBank Accession No: NM_005894.2, Version 2, incorporated herein by reference):

| | |
|---|---|
| 1 | gatcatctga taatgctttg cctgcactca ggacctgtct ttgtccctcc tcttaacata |
| 61 | cttgcagcta aaactaaata ttgctgcttg gggacctcct tctagcctta aatttcagct |
| 121 | catcaccttc acctgccttg gtcatggctc tgctattctc cttgatcctt gccatttgca |
| 181 | ccagacctgg attcctagcg tctccatctg gagtgcggct ggtggggggc ctccaccgct |
| 241 | gtgaagggcg ggtggaggtg gaacagaaag gccagtgggg caccgtgtgt gatgacggct |
| 301 | gggacattaa ggacgtggct gtgttgtgcc gggagctggg ctgtggagct gccagcggaa |
| 361 | cccctagtgg tattttgtat gagccaccag cagaaaaaga gcaaaaggtc ctcatccaat |
| 421 | cagtcagttg cacaggaaca gaagatacat tggctcagtg tgagcaagaa gaagtttatg |
| 481 | attgttcaca tgatgaagat gctggggcat cgtgtgagaa cccagagagc tctttctccc |
| 541 | cagtcccaga gggtgtcagg ctggctgacg gccctgggca ttgcaaggga cgcgtggaag |
| 601 | tgaagcacca gaaccagtgg tataccgtgt gccagacagg ctggagcctc cgggccgcaa |
| 661 | aggtggtgtg ccggcagctg ggatgtggga gggctgtact gactcaaaaa cgctgcaaca |
| 721 | agcatgccta tggccgaaaa cccatctggc tgagccagat gtcatgctca ggacgagaag |
| 781 | caacccttca ggattgccct tctgggcctt gggggaagaa cacctgcaac catgatgaag |
| 841 | acacgtgggt cgaatgtgaa gatccctttg acttgagact agtaggagga gacaacctct |
| 901 | gctctgggcg actggaggtg ctgcacaagg gcgtatgggg ctctgtctgt gatgacaact |
| 961 | ggggagaaaa ggaggaccag gtggtatgca agcaactggg ctgtgggaag tccctctctc |
| 1021 | cctccttcag agaccggaaa tgctatggcc ctggggttgg ccgcatctgg ctggataatg |
| 1081 | ttcgttgctc aggggaggag cagtccctgg agcagtgcca gcacagattt tgggggtttc |
| 1141 | acgactgcac ccaccaggaa gatgtggctg tcatctgctc aggatagtat cctggtgttg |
| 1201 | cttgacctgg cccccctggc cccgcctgcc ctctgcttgt tctcctgagc cctgattatc |
| 1261 | ctcatactca ttctggggct caggcttgag ccactactcc ctcatcccct caggagtctg |
| 1321 | aacactgggc ttatgcctta ctctcaggga caagcagccc ccattgctgc ctgtagatgt |
| 1381 | gagctgttga gttccctctt gctggggaag atgagcttcc atgtatcctg tgctcaaccc |
| 1441 | tgaccctttg acactggttc tggcctttcc tgccttttct caagctgcct ggaatcctca |
| 1501 | aacctgtcac tttggtcaga tgtgcagacc attactaagg tctatgtctg caaacattac |
| 1561 | taatctaggt cctattacta atctatgtct gcaaacatta aaggaatgaa acaatgaaag |
| 1621 | gaacatttga aagaaaatgt gggtagacaa tttcttgcaa cttgggggaa agtttagaat |
| 1681 | tcttttgatt ggactacttt tttttttttt cctcaagctt caggtgacca caatagcaac |
| 1741 | acctccctat tctgttattt cttagtgtag gtagacaatt ctttcaggag cagagcagcg |
| 1801 | tcctataatc ctagaccttt tcatgacgtg taaaaaatga tgtttcatcc tctgattgcc |
| 1861 | ccaataaaaa tctttgttgt ccatccctat acaacctgcc aacatggttg acatttaatg |
| 1921 | agaggaatgt caaaaataca ttttacttta ttcaaagaaa aatatattgg ttactgggaa |
| 1981 | aaggtcaaga aagaggcaga aagagatcag ggagggctaa agttgtgtct tatgccaagc |
| 2041 | gaaagtgaaa aatatcattt tcactttatc aactgagact ttggggcctg taagcttgag |
| 2101 | gcaagacaga aataagagaa tcaagacttg attgtaaaaa ttgacaactt tagattctga |
| 2161 | ggctaggctg agtacttatt atacggctac atttacacat ttacacttat ctaataaatc |
| 2221 | agatttcaca gtctcaaaaa aaaaaaaa |

[0322] An exemplary human IL12RB2 amino acid sequence is set forth below (SEQ ID NO: 86; GenBank Accession No: AAI43250.1, Version 1, incorporated herein by reference):

| | |
|---|---|
| 1 | mahtfrgcsl afmfiitwll ikakidackr gdvtvkpshv illgstvnit cslkprqgcf |
| 61 | hysrrnklil ykfdrrinfh hghslnsqvt glplgttlfv cklacinsde iqicgaeifv |
| 121 | gvapeqpqnl sciqkgeqgt vactwergrd thlyteytlq lsgpknltwq kqckdiycdy |
| 181 | ldfginltpe spesnftakv tavnslgsss slpstftfld ivrplppwdi rikfqkasvs |
| 241 | rctlywrdeg lvllnrlryr psnsrlwnmv nvtkakgrhd lldlkpftey efqissklhl |
| 301 | ykgswsdwse slraqtpeee ptgmldvwym krhidysrqq islfwknlsv seargkilhy |
| 361 | qvtlqeltgg kamtqnitgh tswttviprt gnwavavsaa nskgsslptr inimnlceag |
| 421 | llaprhvsan segmdnilvt wqpprkdpsa vqeyvvewre lhpggdtqvp lnwlrsrpyn |
| 481 | vsaliseipy rvsqnshpin slqprvtyvl wmtaltaage sshgnerefc lqgkanwmaf |
| 541 | vapsiciaii mvgifsthyf qqkvfvllaa lrpqwcsrei pdpanstcak kypiaeektq |
| 601 | lpldrllidw ptpedpeplv isevlhqvtp vfrhppcsnw pgrekgiggh qasekdmmhs |
| 661 | assppppral qaesrqlvdl ykvlesrgsd pkpenpacpw tvlpagdlpt hdgylpsnid |
| 721 | dlpsheapla dsleelepqh islsvfpsss lhpltfscgd kltldqlkmr cdslml |

[0323] An exemplary human IL12RB2 nucleic acid sequence is set forth below (SEQ ID NO: 87; GenBank Accession No: NM_001559.2, Version 2, incorporated herein by reference):

| | |
|---|---|
| 1 | tgcagagcac agagaaagga catctgcgag gaaagttccc tgatggctgt caacaaagtg |
| 61 | ccacgtctct atggctgtga acgctgagca cacgatttta tcgcgcctat catatcttgg |
| 121 | tgcataaacg cacctcacct cggtcaaccc ttgctccgtc ttatgagaca ggctttatta |
| 181 | tccgcatttt atatgagggg aaactgacgg tggagagaga attatcttgc tcaaggcgac |
| 241 | acagcagagc ccacaggtgg cagaatccca cccgagcccg cttcgacccg cggggtggaa |
| 301 | accacgggcg cccgcccggc tgcgcttcca gagctgaact gagaagcgag tcctctccgc |
| 361 | cctgcggcca ccgcccagcc ccgacccccg ccccggcccg atcctcactc gccgccagct |
| 421 | ccccgcgccc accccggagt tggtggcgca gaggcgggag gcggaggcgg gagggcgggc |
| 481 | gctggcaccg ggaacgcccg agcgccggca gagagcgcgg agagcgcgac acgtgcggcc |
| 541 | cagagcaccg gggccacccg gtccccgcag gcccgggacc gcgcccgctg gcaggcgaca |
| 601 | cgtggaagaa tacggagttc tataccagag ttgattgttg atggcacata cttttagagg |
| 661 | atgctcattg gcatttatgt ttataatcac gtggctgttg attaaagcaa aaatagatgc |
| 721 | gtgcaagaga ggcgatgtga ctgtgaagcc ttcccatgta attttacttg gatccactgt |
| 781 | caatattaca tgctctttga agcccagaca aggctgcttt cactattcca gacgtaacaa |
| 841 | gttaatcctg tacaagtttg acagaagaat caattttcac catggccact ccctcaattc |
| 901 | tcaagtcaca ggtcttcccc ttggtacaac cttgtttgtc tgcaaactgg cctgtatcaa |
| 961 | tagtgatgaa attcaaatat gtggagcaga gatcttcgtt ggtgttgctc cagaacagcc |
| 1021 | tcaaaattta tcctgcatac agaagggaga acaggggact gtggcctgca cctgggaaag |
| 1081 | aggacgagac acccacttat acactgagta tactctacag ctaagtggac caaaaaattt |
| 1141 | aacctggcag aagcaatgta aagacattta ttgtgactat ttggactttg gaatcaacct |
| 1201 | cacccctgaa tcacctgaat ccaatttcac agccaaggtt actgctgtca atagtcttgg |
| 1261 | aagctcctct tcacttccat ccacattcac attcttggac atagtgaggc ctcttcctcc |
| 1321 | gtgggacatt agaatcaaat ttcaaaaggc ttctgtgagc agatgtaccc tttattggag |
| 1381 | agatgaggga ctggtactgc ttaatcgact cagatatcgg cccagtaaca gcaggctctg |
| 1441 | gaatatggtt aatgttacaa aggccaaagg aagacatgat ttgctggatc tgaaaccatt |
| 1501 | tacagaatat gaatttcaga tttcctctaa gctacatctt tataagggaa gttggagtga |
| 1561 | ttggagtgaa tcattgagag cacaaacacc agaagaagag cctactggga tgttagatgt |
| 1621 | ctggtacatg aaacggcaca ttgactacag tagacaacag atttctcttt tctggaagaa |
| 1681 | tctgagtgtc tcagaggcaa gaggaaaaat tctccactat caggtgacct tgcaggagct |
| 1741 | gacaggaggg aaagccatga cacagaacat cacaggacac acctcctgga ccacagtcat |
| 1801 | tcctagaacc ggaaattggg ctgtggctgt gtctgcagca aattcaaaag gcagttctct |
| 1861 | gcccactcgt attaacataa tgaacctgtg tgaggcaggg ttgctggctc ctcgccaggt |
| 1921 | ctctgcaaac tcagagggca tggacaacat tctggtgact tggcagcctc ccaggaaaga |
| 1981 | tccctctgct gttcaggagt acgtggtgga atggagagag ctccatccag ggggtgacac |
| 2041 | acaggtccct ctaaactggc tacggagtcg accctacaat gtgtctgctc tgatttcaga |
| 2101 | gaacataaaa tcctacatct gttatgaaat ccgtgtgtat gcactctcag gggatcaagg |
| 2161 | aggatgcagc tccatcctgg gtaactctaa gcacaaagca ccactgagtg gcccccacat |
| 2221 | taatgccatc acagaggaaa aggggagcat tttaatttca tggaacagca ttccagtcca |
| 2281 | ggagcaaatg ggctgcctcc tccattatag gatatactgg aaggaacggg actccaactc |
| 2341 | ccagcctcag ctctgtgaaa ttccctacag agtctcccaa aattcacatc caataaacag |
| 2401 | cctgcagccc cgagtgacat atgtcctgtg gatgacagct ctgacagctg ctggtgaaag |
| 2461 | ttcccacgga aatgagaggg aattttgtct gcaaggtaaa gccaattgga tggcgtttgt |
| 2521 | ggcaccaagc atttgcattg ctatcatcat ggtgggcatt ttctcaacgc attacttcca |
| 2581 | gcaaaaggtg tttgttctcc tagcagccct cagacctcag tggtgtagca gagaaattcc |
| 2641 | agatccagca aatagcactt gcgctaagaa atatcccatt gcagaggaga agacacagct |
| 2701 | gcccttggac aggctcctga tagactggcc cacgcctgaa gatcctgaac cgctggtcat |
| 2761 | cagtgaagtc cttcatcaag tgaccccagt tttcagacat cccccctgct ccaactggcc |
| 2821 | acaaagggaa aaaggaatcc aaggtcatca ggcctctgag aaagacatga tgcacagtgc |
| 2881 | ctcaagccca ccacctccaa gagctctcca agctgagagc agacaactgg tggatctgta |
| 2941 | caaggtgctg gagagcaggg gctccgaccc aaagcccgaa aacccagcct gtccctggac |
| 3001 | ggtgctccca gcaggtgacc ttcccaccca tgatggctac ttaccctcca acatagatga |
| 3061 | cctcccctca catgaggcac ctctcgctga ctctctggaa gaactggagc ctcagcacat |
| 3121 | ctccctttct gttttcccct caagttctct tcacccactc accttctcct gtggtgataa |
| 3181 | gctgactctg gatcagttaa agatgaggtg tgactccctc atgctctgag tggtgaggct |
| 3241 | tcaagcctta aagtcagtgt gccctcaacc agcacagcct gccccaattc ccccagcccc |
| 3301 | tgctccagca gctgtcatct ctgggtgcca ccatcggtct ggctgcagct agaggacagg |
| 3361 | caagccagct ctgggggagt cttaggaact gggagttggt cttcactcag atgcctcatc |
| 3421 | ttgcctttcc cagggcctta aaattacatc cttcactgtg tggacctaga gactccaact |
| 3481 | tgaattccta gtaactttct tggtatgctg gccagaaagg gaaatgagga ggagagtaga |
| 3541 | aaccacagct cttagtagta atggcataca gtctagagga ccattcatgc aatgactatt |
| 3601 | tctaaagcac ctgctacaca gcaggctgta cacagcagat cagtactgtt caacagaact |
| 3661 | tcctgagatg atggaaatgt tctacctctg cactcactgt ccagtacatt agacactagg |
| 3721 | cacattggct gttaatcact tggaatgtgt ttagcttgac tgaggaatta aattttgatt |
| 3781 | gtaaatttaa atcgccacac atggctagtg gctactgtat tggagtgcac agctctagat |
| 3841 | ggctcctaga ttattgagag ccttcaaaac aaatcaacct agttctatag atgaagacat |
| 3901 | aaaagacact ggtaaacacc aaggtaaaag ggcccccaag gtggtcatga ctggtctcat |
| 3961 | ttgcagaagt ctaagaatgt acctttttct ggccgggcgt ggtagctcat gcctgtaatc |
| 4021 | ccagcacttt gggaggctga |

[0324] An exemplary human FAIM3 amino acid sequence is set forth below (SEQ ID NO: 88; GenBank Accession No: EAW93517.1, Version 1, incorporated herein by reference):

| | |
|---|---|
| 1 | mdfwlwplyf lpvsgalril pevkvegelg gsvtikcplp emhvriylcr emagsgtcgt |
| 61 | vvsttnfika eykgrvtlkq yprknlflve vtqltesdsg vyacgagmnt drgktqkvtl |
| 121 | nvhseyepsw eeqpmpetpk wfhlpylfqm payassskfv trvttpaqrg kvppvhhssp |
| 181 | ttqithrprv srassvagdk prtflpstta skisalegll kpqtpsynhh trlhrqrald |
| 241 | ygsqsgregq gfhiliptil glfllallgl vvkraverrk alsrrarrla vrmralessq |
| 301 | rprgsprprs qnniysacpr rargadaagt geapvpgpga plppaplqvs espwlhapsl |
| 361 | ktsceyvsly hqpaammeds dsddyinvpa |

[0325] An exemplary human FAIM3 nucleic acid sequence is set forth below (SEQ ID NO: 89; GenBank Accession No: NM_005449.4, Version 4, incorporated herein by reference):

| | |
|---|---|
| 1 | agcctgagaa tagttagcaa acaagggagg ttgtcatttc ctcatcgtca agctttgttc |
| 61 | ctcgtggggg ctagaaatct ctttccagtt ccagattgtg aagggttcct gagtaagcag |
| 121 | cgtgtctcca tccccctctc taggggctct tggatggacc ttgcactcta gaagggacaa |
| 181 | tggacttctg gctttggcca ctttacttcc tgccagtatc gggggccctg aggatcctcc |
| 241 | cagaagtaaa ggtagagggg gagctgggcg gatcagttac catcaagtgc ccacttcctg |
| 301 | aaatgcatgt gaggatatat ctgtgccggg agatggctgg atctggaaca tgtggtaccg |
| 361 | tggtatccac caccaacttc atcaaggcag aatacaaggg ccgagttact ctgaagcaat |
| 421 | acccacgcaa gaatctgttc ctagtggagg taacacagct gacagaaagt gacagcggag |
| 481 | tctatgcctg cggagcgggc atgaacacag accggggaaa gacccagaaa gtcaccctga |
| 541 | atgtccacag tgaatacgag ccatcatggg aagagcagcc aatgcctgag actccaaaat |
| 601 | ggtttcatct gccctatttg ttccagatgc ctgcatatgc cagttcttcc aaattcgtaa |
| 661 | ccagagttac cacaccagct caaaggggca aggtccctcc agttcaccac tcctccccca |
| 721 | ccacccaaat cacccaccgc cctcgagtgt ccagagcatc ttcagtagca ggtgacaagc |
| 781 | cccgaacctt cctgccatcc actacagcct caaaaatctc agctctggag gggctgctca |
| 841 | agccccagac gcccagctac aaccaccaca ccaggctgca caggcagaga gcactggact |
| 901 | atggctcaca gtctgggagg gaaggccaag gatttcacat cctgatcccg accatcctgg |
| 961 | gccttttcct gctggcactt ctggggctgg tggtgaaaag ggccgttgaa aggaggaaag |
| 1021 | ccctctccag gcgggcccgc cgactggccg tgaggatgcg cgccctggag agctcccaga |
| 1081 | ggccccgcgg gtcgccgcga ccgcgctccc aaaacaacat ctacagcgcc tgcccgcggc |
| 1141 | gcgctcgtgg agcggacgct gcaggcacag gggaggcccc cgttcccggc cccggagcgc |
| 1201 | cgttgccccc cgccccgctg caggtgtctg aatctccctg gctccatgcc ccatctctga |
| 1261 | agaccagctg tgaatacgtg agcctctacc accagcctgc cgccatgatg gaggacagtg |
| 1321 | attcagatga ctacatcaat gttcctgcct gacaactccc cagctatccc ccaaccccag |
| 1381 | gctcggactg tggtgccaag gagtctcatc tatctgctga tgtccaatac ctgcttcatg |
| 1441 | tgttctcaga gccctcatca cttcccatgc cccatctcga ctcccatccc catctatctg |
| 1501 | tgccctgagc atggctctgc ccccaggtcg tcttgcacac cttggcagcc ccctgtagtt |
| 1561 | gacaggtaag ctgtaggcat gtagagcaat tgtcccaatg ccacttgctt cctttccaag |
| 1621 | ccgtcgaaca gactgtggga tttgcagagt gtttcttcca tgtctttgac cacagggttg |
| 1681 | ttgctgccca ggctctagat cacatggcat caggctgggg cagaggcata gctattgtct |
| 1741 | cgggcatcct tcccagggtt gggtcttaca caaatagaag gctcttgctc tgagttatgt |
| 1801 | gacatgcctc agccccatgg actaagcagg ggtctggtat aaaaacactc ctggaaacgc |
| 1861 | ctttgccctg atccaaatgt tagcacttgc tagtgaacgt ctacttatct caagttctat |
| 1921 | gctaaaggca atttatcttg atgtgatgat aaaccaaact tattagcaag atatgcatat |
| 1981 | atatccataa attctcttta ctctgtctcc atcacttgat gcacataagt gccctgacct |
| 2041 | cagcatctcc cctctaaaaa aaaaaaaaaa aaagtatctc tttatctttc ttccatagcc |
| 2101 | tgacactgat atttgtgcac ttaccttaac tttggtctat tttattcatc caaaaccatt |
| 2161 | acatttcttg gttttcacaa atgttcccca tttcttagcc agttccagac aatgtatagc |
| 2221 | aagcagggga aggaaagcag tcaggagttc ctgggtggcc acggctctgc aatagcactt |
| 2281 | atgtcatgga agtgatatcc cacctcctac atatactctt tgcctaggtt tttggaacaa |
| 2341 | ggttatagtc agacactgta tctttagatt gatgtcgacc acaaagttca gccagagctt |
| 2401 | gaggctagat gcacagcctt gctattggga agaaggcctt ttctagctgt acaacacagt |
| 2461 | ctcactgggc attcatccag aaatagagaa gaaagtctgc cagacttgag ttatgttgtc |
| 2521 | ttttattagc agggaatgtc atcacagatt ggatagtaca tccaggtgca atgtcaccat |
| 2581 | cagcaaggtc agcttgacac tcaagtggaa gattagggaa gaatgactag gataaaaaaa |
| 2641 | aaaggagggc accaagggaa agggatgatg gggtgagctg gcgagtgtgg gtgggaaatg |
| 2701 | aaatgtttat tgaggatctg ctttgtgctg ggcactttaa tccacatttt atcgtttact |
| 2761 | tttcaaacag atgcacctta cccccacccc aatgctctgt ccctgcagat atcagaagac |
| 2821 | agtgtgattt tcatgctctg aagttcagtt ttacatccaa gcatccctct ctgtttttta |
| 2881 | acaatccaaa gacaggccaa aaaaagcacc acagtttatt aagtacttac taagcaccca |
| 2941 | tccactgccc cacactgtgg caaggattgt gaggggtaaa gaagcatggg gcacaatatt |
| 3001 | ctgctgcctt catgtaactt acagtctcac aaataaatag aacttcagtt gaaatactga |
| 3061 | cattaattaa atagagttgt aataaaaaaa aaaaaaaaaa aaaaaaaaa |

[0326] An exemplary human PTCRA amino acid sequence is set forth below (SEQ ID NO: 90; GenBank Accession No: AAI53830.1, Version 1, incorporated herein by reference):

| | |
|---|---|
| 1 | magtwlllll algcpalptg vggtpfpsla ppimllvdgk qqmvvvclvl dvappgldsp |
| 61 | iwfsagngsa ldaftygpsp atdgtwtnla hlslpseela sweplichtg pgaeghsrst |
| 121 | qpmhlsgeas tartcpqepl rgtpggalwl gvlrlllfkl llfdllltcs clcdpagplp |
| 181 | spatttrlra lgshrlhpat etggreatss prpqprdrrw gdtppgrkpg spvwgegsyl |
| 241 | ssyptcpaqa wcsrsalrap ssslgaffag dlppplqaga a |

[0327] An exemplary human PTCRA nucleic acid sequence is set forth below (SEQ ID NO: 91; GenBank Accession No: NM_001243168.1, Version 1, incorporated herein by reference):

| | |
|---|---|
| 1 | tagaaggcag tcttgtgggt gcctcctccc ccagccgcaa ctcaggtctg cagctgggtc |
| 61 | ctgcctcctt ccgagtgggc catggccggt acatggctgc tacttctcct ggcccttggg |
| 121 | tgtccagccc tacccacagg tgtgggcggc acaccctttc cttctctggc cccaccaatc |
| 181 | atgctgctgg tggatggaaa gcagcagatg gtggtggtct gcctggtcct tgatgttgca |
| 241 | ccccctggcc ttgacagccc catctggttc tcagccggca atggcagtgc actggatgcc |
| 301 | ttcacctatg gcccttcccc agcaacggat ggcacctgga ccaacttggc ccatctctcc |
| 361 | ctgccttctg aggagctggc atcctgggag cctttggtct gccacactgg gcctggggct |
| 421 | gagggtcaca gcaggagtac acagcccatg catctgtcag gagaggcttc tacagccagg |
| 481 | acctgccccc aggagcctct cagggggggc tgcgggctcc tgcgggctcc tgagcggttc |
| 541 | ctcctcgcag ggacaccggg tggggcgctg tggctggggg tcctgcggct gctgctcttc |
| 601 | aagctgctgc tgtttgacct gctcctgacc tgcagctgcc tgtgcgaccc cgcgggcccg |
| 661 | ctgccttccc ccgcaaccac cacccgcctg cgagccctcg gctcccatcg actgcacccg |
| 721 | gccacggaga ctgggggacg agaggccacc agctcaccca gaccccagcc tcgggaccgc |
| 781 | cgctggggtg acacccctcc gggtcggaag cccgggagcc cagtatgggg ggaagggtct |
| 841 | tacctcagca gttaccccac ttgcccagca caggcctggt gctcaagatc tgccctcagg |
| 901 | gctccttcct ccagtcttgg agcatttttt gcaggtgacc tgcctcctcc tctgcaggct |
| 961 | ggagctgcct gagggcaggg ctctacctcc cctgcgtcac actgtgtgag gctgtgtctc |
| 1021 | tgccatccaa aagggggccc cttgagaatg gtgatccacc cagttacagg ggcatttagg |
| 1081 | gagcagatga ctgagaacat taaaaaagaa cttaaatgac acagcaaaaa aaaaaaaaaa |
| 1141 | aa |

[0328] An exemplary human CD2 amino acid sequence is set forth below (SEQ ID NO: 92; GenBank Accession No: AAA51946.1, Version 1, incorporated herein by reference):

| | |
|---|---|
| 1 | msfpckfvas fllifnvssk gavskeitna letwgalgqd inldipsfqm sddiddikwe |
| 61 | ktsdkkkiaq frkeketfke kdtyklfkng tlkikhlktd dqdiykvsiy dtkgknvlek |
| 121 | ifdlkiqery skpkiswtci nttltcevmn gtdpelnlyq dgkhlklsqr vithkwttsl |
| 181 | sakfkctagn kvskessvep vscpekgldi yliigicggg sllmvfvall vfyitkrkkq |
| 241 | rsrrndeele trahrvatee rgrkphqipa stpqnpatsq hpppppghrs qapshrpppp |
| 301 | ghrvqhqpqk rppapsgtqv hqqkgpplpr prvqpkppmg qqkthcplpl ikkdrnclfq |

[0329] An exemplary human CD2 nucleic acid sequence is set forth below (SEQ ID NO: 93; GenBank Accession No: NM_001328609.1, Version 1, incorporated herein by reference):

| | |
|---|---|
| 1 | agtctcactt cagttccttt tgcatgaaga gctcagaatc aaaagaggaa accaacccct |
| 61 | aagatgagct ttccatgtaa atttgtagcc agcttccttc tgattttcaa tgtttcttcc |
| 121 | aaaggtgcag tctccaaaga gattacgaat gccttggaaa cctggggtgc cttgggtcag |
| 181 | gacatcaact tggacattcc tagttttcaa atgagtgatg atattgacga tataaaatgg |
| 241 | gaaaaaactt cagacaagaa aaagattgca caattcagaa aagagaaaga gactttcaag |
| 301 | gaaaaagata catataagct atttaaaaat ggaactctga aaattaagca tctgaagacc |
| 361 | gatgatcagg atatctacaa ggtatcaata tatgatacaa aaggaaaaaa tgtgttggaa |
| 421 | aaaatatttg atttgaagat tcaagagagg gtctcaaaac caaagatctc ctggacttgt |
| 481 | atcaacacaa ccctgacctg tgaggtaatg aatggaactg accccgaatt aaacctgtat |
| 541 | caagatggga aacatctaaa actttctcag agggtcatca cacacaagtg gaccaccagc |
| 601 | ctgagtgcaa aattcaagtg cacagcaggg aacaaagtca gcaaggaatc cagtgtcgag |
| 661 | cctgtcagct gtccaggagg cagcatcctt ggccagagta atgggctctc tgcctggacc |
| 721 | cctcccagcc atcccacttc tcttcctttt gcagagaaag gtctggacat ctatctcatc |
| 781 | attggcatat gtggaggagg cagcctcttg atggtctttg tggcactgct cgttttctat |
| 841 | atcaccaaaa ggaaaaaaca gaggagtcgg agaaatgatg aggagctgga gacaagagcc |
| 901 | cacagagtag ctactgaaga aaggggccgg aagccccacc aaattccagc ttcaacccct |
| 961 | cagaatccag caacttccca acatcctcct ccaccacctg gtcatcgttc ccaggcacct |
| 1021 | agtcatcgtc ccccgcctcc tggacaccgt gttcagcacc agcctcagaa gaggcctcct |
| 1081 | gctccgtcgg gcacacaagt tcaccagcag aaaggcccgc ccctccccag acctcgagtt |
| 1141 | cagccaaaac ctccccatgg ggcagcagaa aactcattgt ccccttcctc taattaaaaa |
| 1201 | agatagaaac tgtctttttc aataaaaagc actgtggatt tctgccctcc tgatgtgcat |
| 1261 | atccgtactt ccatgaggtg ttttctgtgt gcagaacatt gtcacctcct gaggctgtgg |
| 1321 | gccacagcca cctctgcatc ttcgaactca gccatgtggt caacatctgg agtttttggt |
| 1381 | ctcctcagag agctccatca caccagtaag gagaagcaat ataagtgtga ttgcaagaat |
| 1441 | ggtagaggac cgagcacaga aatcttagag atttcttgtc ccctctcagg tcatgtgtag |
| 1501 | atgcgataaa tcaagtgatt ggtgtgcctg ggtctcacta caagcagcct atctgcttaa |
| 1561 | gagactctgg agtttcttat gtgccctggt ggacacttgc ccaccatcct gtgagtaaaa |
| 1621 | gtgaaataaa agctttgact agaaaaaaaa aaaaaaaaaa |

[0330] An exemplary human CD6 amino acid sequence is set forth below (SEQ ID NO: 94; GenBank Accession No: AAH33755.1, Version 1, incorporated herein by reference):

| | |
|---|---|
| 1 | mwlffgitgl ltaalsghps pappdqlnts saeselwepg erlpvrltng ssscsgtvev |
| 61 | rleaswepac galwdsraae avcralgcgg aeaasqlapp tpelppppaa gntsvaanat |
| 121 | lagapallcs gaewrlcevv ehacrsdgrr arvtcaenra lrlvdgggac agrvemlehg |
| 181 | ewgsvcddtw dledahvvcr qlgcgwavqa lpglhftpgr gpihrdqvnc sgaeaylwdc |
| 241 | pglpgqhycg hkedagavcs ehqswrltgg adrcegqvev hfrgvwntvc dsewypseak |
| 301 | vlcqslgcgt averpkglph slsgrmyysc ngeeltlsnc swrfnnsnlc sqslaarvlc |
| 361 | sasrslhnls tpevpasvqt vtiessvtvk ienkesrelm llipsivlgi lllgslifia |
| 421 | fillrikgky alpvmvnhqh lpttipagsn syqpvpitip kevfmlpiqv qapppedsds |
| 481 | gsdsdyehyd fsaqppvalt tfynsqrhrv tdeevqqsrf qmppleegle elhashipta |
| 541 | npghcitdpp slgpqyhprs nsesstssge dycnspkskl ppwnpqvfss erssfleqpp |
| 601 | nlelagtqpa fsgppaddss stssgewyqn fqprllgwl |

[0331] An exemplary human CD6 nucleic acid sequence is set forth below (SEQ ID NO: 95; GenBank Accession No: NM_006725.4, Version 4, incorporated herein by reference):

| | |
|---|---|
| 1 | gcagaccaaa accacaagca gaacaagcag gcgtgagaca ctcacaggtt gggtttgatc |
| 61 | gcatgcgtgt cggagaggag agagcagaga gagacacagg aacaagaaca gcaaagggta |
| 121 | gagcagacct gcgccagggg cgcacaacgg ccgtgtccac ctcccggccc caagatggtg |
| 181 | cttcccacag gcagccacgc gtagcagcca gagacagctc cagacatgtg gctcttcttc |
| 241 | gggatcactg gattgctgac ggcagccctc tcaggtcatc catctccagc cccacctgac |
| 301 | cagctcaaca ccagcagtgc agagagtgag ctctgggagc caggggagcg gcttccggtc |
| 361 | cgtctgacaa acgggagcag cagctgcagc gggacggtgg aggtgcggct cgaggcgtcc |
| 421 | tgggagcccg cgtgcggggc gctctgggac agccgcgccg ccgaggccgt gtgccgagca |
| 481 | ctgggctgcg gcggggcgga ggccgcctct cagctcgccc cgccgacccc tgagctgccg |
| 541 | cccccgcctg cagccgggaa caccagcgta gcagctaatg ccactctggc cggggcgccc |
| 601 | gccctcctgt gcagcggcgc cgagtggcgg ctctgcgagg tggtggagca cgcgtgccgc |
| 661 | agcgacggga ggcgggcccg tgtcacctgt gcagagaacc gcgcgctgcg cctggtggac |
| 721 | ggtggcggcg cctgcgccgg ccgcgtggag atgctggagc atggcgagtg gggatcagtg |
| 781 | tgcgatgaca cttgggacct ggaggacgcc cacgtggtgt gcaggcaact gggctgcggc |
| 841 | tgggcagtcc aggccctgcc cggcttgcac ttcacgcccg gccgcgggcc tatccaccgg |
| 901 | gaccaggtga actgctcggg ggccgaagct tacctgtggg actgcccggg gctgccagga |
| 961 | cagcactact gcggccacaa agaggacgcg ggcgcggtgt gctcagagca ccagtcctgg |
| 1021 | cgcctgacag ggggcgctga ccgctgcgag gggcaggtgg aggtacactt ccgaggggtc |
| 1081 | tggaacacag tgtgtgacag tgagtggtac ccatcggagg ccaaggtgct ctgccagtcc |
| 1141 | ttgggctgtg gaactgcggt tgagaggccc aaggggctgc cccactcctt gtccggcagg |
| 1201 | atgtactact catgcaatgg ggaggagctc accctctcca actgctcctg gcggttcaac |
| 1261 | aactccaacc tctgcagcca gtcgctggca gccagggtcc tctgctcagc ttcccggagt |
| 1321 | ttgcacaatc tgtccactcc cgaagtccct gcaagtgttc agacagtcac tatagaatct |
| 1381 | tctgtgacag tgaaaataga gaacaaggaa tctcgggagc taatgctcct catcccctcc |
| 1441 | atcgttctgg gaattctcct ccttggctcc ctcatcttca tagccttcat cctcttgaga |
| 1501 | attaaaggaa aatatgccct ccccgtaatg gtgaaccacc agcacctacc caccaccatc |
| 1561 | ccggcaggga gcaatagcta tcaaccggtc cccatcacca tccccaaaga agttttcatg |
| 1621 | ctgcccatcc aggtccaggc cccgccccct gaggactcag actctggctc ggactcagac |
| 1681 | tatgagcact atgacttcag cgcccagcct cctgtggccc tgaccacctt ctacaattcc |
| 1741 | cagcggcatc gggtcacaga tgaggaggtc cagcaaagca ggttccagat gccacccttg |
| 1801 | gaggaaggac ttgaagagtt gcatgcctcc cacatcccaa ctgccaaccc tggacactgc |
| 1861 | attacagacc cgccatccct gggccctcag tatcacccga ggagcaacag tgagtcgagc |
| 1921 | acctcttcag gggaggatta ctgcaatagt cccaaaagca agctgcctcc atggaacccc |
| 1981 | caggtgtttt cttcagagag gagttccttc ctggagcagc ccccaaactt ggagctggcc |
| 2041 | ggcacccagc cagccttttc agcagggccc ccggctgatg acagctccag cacctcatcc |
| 2101 | ggggagtggt accagaactt ccagccacca ccccagcccc cttcggagga gcagtttggc |
| 2161 | tgtccagggt cccccagccc tcagcctgac tccaccgaca acgatgacta cgatgacatc |
| 2221 | agcgcagcct aggccggggc cagccgaggc tcctggggtg gctctgaccc tctggcctcc |
| 2281 | tgctctacct actccctttc ccctttccca ccctcccagc tcacctcccc atggagctga |
| 2341 | gaggcctccc ttggagagat ggaaggaaac gttatacctt gtacccctcg gtctccatcc |
| 2401 | atcaagccaa acctgctgcc acagccctcc cccggcccca gatagcagcc ccagggagga |
| 2461 | tgctgcctcc aagaggtgtg agccctctgt ctcggggatg aacaagcaga gtctgggcta |
| 2521 | cctcttgaca gctggtggag gggagttggg gagctggact ggatgactct ggaggcccct |
| 2581 | tccaaacctc aagtgtccgg cgctttgatt gcctgagttt ctgacacttc agggcccaga |
| 2641 | ggtcctgcga ggggcagaac tggaccccca tgccagtgct gctgcaggag ggcccatata |
| 2701 | ctagggtctg ctgagctgtt gtcactgatc ggtgggcgct gggggggtag ggtagcacac |
| 2761 | cagctgtccc aggctttgct ccgggcggta actgcacttg ggcagggaat atagccttcc |
| 2821 | tgggcacaac tagctgacaa tgacaggttg actgtgtacc cccaaccaag gagctggggc |
| 2881 | ccaaggccag tcctgcccca gagacactcc aagtccgcca ggggcacaga ccagttctgc |
| 2941 | agtgactgtc cctggacaat gggtctttat tctgagtttc ctatggttta caaagagggc |
| 3001 | cccagcccag ccccaccaca gatcccagag ataggggccc agtctccatg ggggcaagga |
| 3061 | gcatagagat gttttccagg aaggggctca gaagctgcac taggccccga gtccccatgt |
| 3121 | gtctccttga attgatgagg atgctcctgg gagggatgcg tgactatgtg gtgttgcacc |
| 3181 | cggggctgca aacgtctccg tgcagccccc agagagaggc ccatgggctc agaccaggct |
| 3241 | ttgttgtcct gctctgagta tcctgagatt aaactgaatt gctgaatgaa aaaaaaaaaa |
| 3301 | aaaaaaaaa |

[0332] An exemplary human CXCL13 amino acid sequence is set forth below (SEQ ID NO: 96; GenBank Accession No: AAH12589.1, Version 1, incorporated herein by reference):

| | |
|---|---|
| 1 | mkfistslll mllvsslspv qgvlevyyts lrcrcvqess vfiprrfidr iqilprgngc |
| 61 | prkeiivwkk nksivcvdpq aewiqrmmev lrkrssstlp vpvfkrkip |

[0333] An exemplary human CXCL13 nucleic acid sequence is set forth below (SEQ ID NO: 97; GenBank Accession No: NM_006419.2, Version 2, incorporated herein by reference):

| | |
|---|---|
| 1 | gagaagatgt ttgaaaaaac tgactctgct aatgagcctg gactcagagc tcaagtctga |
| 61 | actctacctc cagacagaat gaagttcatc tcgacatctc tgcttctcat gctgctggtc |
| 121 | agcagcctct ctccagtcca aggtgttctg gaggtctatt acacaagctt gaggtgtaga |
| 181 | tgtgtccaag agagctcagt ctttatccct agacgcttca ttgatcgaat tcaaatcttg |
| 241 | ccccgtggga atggttgtcc aagaaaagaa atcatagtct ggaagaagaa caagtcaatt |
| 301 | gtgtgtgtgg accctcaagc tgaatggata caaagaatga tggaagtatt gagaaaaaga |
| 361 | agttcttcaa ctctaccagt tccagtgttt aagagaaaga ttccctgatg ctgatatttc |
| 421 | cactaagaac acctgcattc ttcccttatc cctgctctgg attttagttt tgtgcttagt |
| 481 | taaatctttt ccaggaaaaa gaacttcccc atacaaataa gcatgagact atgtaaaaat |
| 541 | aaccttgcag aagctgatgg ggcaaactca agcttcttca ctcacagcac cctatataca |
| 601 | cttggagttt gcattcttat tcatcaggga ggaaagtttc tttgaaaata gttattcagt |
| 661 | tataagtaat acaggattat tttgattata tacttgttgt ttaatgttta aaatttctta |
| 721 | gaaaacaatg gaatgagaat ttaagcctca aatttgaaca tgtggcttga attaagaaga |
| 781 | aaattatggc atatattaaa agcaggcttc tatgaaagac tcaaaaagct gcctgggagg |
| 841 | cagatggaac ttgagcctgt caagaggcaa aggaatccat gtagtagata tcctctgctt |
| 901 | aaaaactcac tacggaggag aattaagtcc tacttttaaa gaatttcttt ataaaattta |
| 961 | ctgtctaaga ttaatagcat tcgaagatcc ccagacttca tagaatactc agggaaagca |
| 1021 | tttaaagggt gatgtacaca tgtatccttt cacacatttg ccttgacaaa cttctttcac |
| 1081 | tcacatcttt ttcactgact ttttttgtgg ggggcggggc cggggggact ctggtatcta |
| 1141 | attctttaat gattcctata aatctaatga cattcaataa agttgagcaa acattttact |
| 1201 | taaaaaaaaa aaaaaaaaa |

[0334] An exemplary human CD3D amino acid sequence is set forth below (SEQ ID NO: 98; GenBank Accession No: AEQ93556.1, Version 1, incorporated herein by reference):

| | |
|---|---|
| 1 | mehstflsgl vlatllsqvc qscveldpat vagiivtdvi atlllalgvf cfaghetgrl |
| 61 | sgaadtqall rndqvygplr drddagyshl ggnwarnk |

[0335] An exemplary human CD3D nucleic acid sequence is set forth below (SEQ ID NO: 99; GenBank Accession No: BAJ000732.4, Version 4, incorporated herein by reference):

| | |
|---|---|
| 1 | agagaagcag acatcttcta gttcctcccc cactctcctc tttccggtac ctgtgagtca |
| 61 | gctaggggag ggcagctctc acccaggctg atagttcggt gacctggctt tatctactgg |
| 121 | atgagttccg ctgggagatg gaacatagca cgtttctctc tggcctggta ctggctaccc |
| 181 | ttctctcgca agtgagcccc ttcaagatac ctatagagga acttgaggac agagtgtttg |
| 241 | tgaattgcaa taccagcatc acatgggtag agggaacggt gggaacactg ctctcagaca |
| 301 | ttacaagact ggacctggga aaacgcatcc tggacccacg aggaatatat aggtgtaatg |
| 361 | ggacagatat atacaaggac aaagaatcta ccgtgcaagt tcattatcga atgtgccaga |
| 421 | gctgtgtgga gctggatcca gccaccgtgg ctggcatcat tgtcactgat gtcattgcca |
| 481 | ctctgctcct tgctttggga gtcttctgct ttgctggaca tgagactgga aggctgtctg |
| 541 | gggctgccga cacacaagct ctgttgagga atgaccaggt ctatcagccc ctccgagatc |
| 601 | gagatgatgc tcagtacagc caccttggag gaaactgggc tcggaacaag tgaacctgag |
| 661 | actggtggct tctagaagca gccattacca actgtacctt cccttcttgc tcagccaata |
| 721 | aatatatcct ctttcactca gaaaaaaaaa aaaaaaaaaa aaaaaaaaaa a |

[0336] An exemplary human CD3E nucleic acid sequence is set forth below (SEQ ID NO: 101; GenBank Accession No: NM_16130.1, Version 1, incorporated herein by reference):

| | |
|---|---|
| 1 | mqsgthwrvl glcllsvgvw gqdewvvlrg itqtpykvsi sgttviltcp qypgseilwq |
| 61 | hndkniggde ddknigsded hlslkefsel eqsgyyvcyp rgskpedanf ylylrarvce |
| 121 | ncmemdvmsv ativivdici tggllllvyy wsknrkakak pvtrgagagg rqrgqnkerp |
| 181 | ppvpnpdyep irkgqrdlys glnqrri |

[0337] An exemplary human CD3G amino acid sequence is set forth below (SEQ ID NO: 101; GenBank Accession No: NM_000733.3,Version 3, incorporated herein by reference):

| | |
|---|---|
| 1 | tattgtcaga gtcctcttgt ttggccttct aggaaggctg tgggacccag ctttcttcaa |
| 61 | ccagtccagg tggaggcctc tgccttgaac gtttccaagt gaggtaaaac ccgcaggccc |
| 121 | agaggcctct ctacttcctg tgtggggttc agaaaccctc ctcccctccc agcctcaggt |
| 181 | gcctgcttca gaaaatgaag tagtaagtct gctggcctcc gccatcttag taaagtaaca |
| 241 | gtcccatgaa acaaagatgc agtcgggcac tcactggaga gttctgggcc tctgcctctt |
| 301 | atcagttggc gtttgggggc aagatggtaa tgaagaaatg ggtggtatta cacagacacc |
| 361 | atataaagtc tccatctctg gaaccacagt aatattgaca tgccctcagt atcctggatc |
| 421 | tgaaatacta tggcaacaca atgataaaaa cataggcggt gatgaggatg ataaaaacat |
| 481 | aggcagtgat gaggatcacc tgtcactgaa ggaattttca gaattggagc aaagtggtta |
| 541 | ttatgtctgc taccccagag gaagcaaacc agaagatgcg aacttttatc tctacctgag |
| 601 | ggcaagagtg tgtgagaact gcatggagat ggatgtgatg tcggtggcca caattgtcat |
| 661 | agtggacatc tgcatcactg ggggcttgct gctgctggtt tactactgga gcaagaatag |
| 721 | aaaggccaag gccaagcctg tgacacgagg agcgggtgct ggcggcaggc aaaggggaca |
| 781 | aaacaaggag aggccaccac ctgttcccaa cccagactat gagcccatcc ggaaaggcca |
| 841 | gcgggacctg tattctggcc tgaatcagag acgcatctga ccctctggag aacactgcct |
| 901 | cccgctggcc caggtctcct ctccagtccc cctgcgactc cctgtttcct gggctagtct |
| 961 | tggaccccac gagagagaat cgttcctcag cctcatggtg aactcgcgcc ctccagcctg |
| 1021 | atcccccgct ccctcctccc tgccttctct gctggtaccc agtcctaaaa tattgctgct |
| 1081 | tcctcttcct ttgaagcatc atcagtagtc acaccctcac agctggcctg ccctcttgcc |
| 1141 | aggatattta tttgtgctat tcactccctt ccctttggat gtaacttctc cgttcagttc |
| 1201 | cctccttttc ttgcatgtaa gttgtccccc atcccaaagt attccatcta cttttctatc |
| 1261 | gccgtcccct tttgcagccc tctctgggga tggactgggt aaatgttgac agaggccctg |
| 1321 | ccccgttcac agatcctggc cctgagccag ccctgtgctc ctccctcccc caacactccc |
| 1381 | taccaacccc ctaatcccct actccctcca ccccccctcc actgtaggcc actggatggt |
| 1441 | catttgcatc tccgtaaatg tgctctgctc ctcagctgag agagaaaaaa ataaactgta |
| 1501 | tttggctgca agaaaaaaaa aaaaaaaaaa aaaa |

[0338] An exemplary human CD3G amino acid sequence is set forth below (SEQ ID NO: 102; GenBank Accession No: P09693.1, Version 1, incorporated herein by reference):

| | |
|---|---|
| 1 | meqgkglavl ilaiillqgt laqsikgnhl vkvydyqedg svlltcdaea knitwfkdgk |
| 61 | migfltedkk kwnlgsnakd prgmyqckgs qnkskplqvy yrmcqnciel naatisgflf |
| 121 | aeivsifvla vgvyfiagqd gvrqsrasdk qtllpndqly qplkdreddq yshlqgnqlr |
| 181 | rn |

[0339] An exemplary human CD3G nucleic acid sequence is set forth below (SEQ ID NO: 103; GenBank Accession No: NM_000073.2, Version 2, incorporated herein by reference):

| | |
|---|---|
| 1 | agtctagctg ctgcacaggc tggctggctg gctggctgct aagggctgct ccacgctttt |
| 61 | gccggaggac agagactgac atggaacagg ggaagggcct ggctgtcctc atcctggcta |
| 121 | tcattcttct tcaaggtact ttggcccagt caatcaaagg aaaccacttg gttaaggtgt |
| 181 | atgactatca agaagatggt tcggtacttc tgacttgtga tgcagaagcc aaaaatatca |
| 241 | catggtttaa agatgggaag atgatcggct tcctaactga agataaaaaa aaatggaatc |
| 301 | tgggaagtaa tgccaaggac cctcgaggga tgtatcagtg taaaggatca cagaacaagt |
| 361 | caaaaccact ccaagtgtat tacagaatgt gtcagaactg cattgaacta aatgcagcca |
| 421 | ccatatctgg ctttctcttt gctgaaatcg tcagcatttt cgtccttgct gttggggtct |
| 481 | acttcattgc tggacaggat ggagttcgcc agtcgagagc ttcagacaag cagactctgt |
| 541 | tgcccaatga ccagctctac cagcccctca aggatcgaga agatgaccag tacagccacc |
| 601 | ttcaaggaaa ccagttgagg aggaattgaa ctcaggactc agagtagtcc aggtgttctc |
| 661 | ctcctattca gttcccagaa tcaaagcaat gcattttgga aagctcctag cagagagact |
| 721 | ttcagcccta aatctagact caaggttccc agagatgaca aatggagaag aaaggccatc |
| 781 | agagcaaatt tgggggtttc tcaaataaaa taaaaataaa aacaaatact gtgtttcaga |
| 841 | agcgccacct attggggaaa attgtaaaag aaaaatgaaa agatcaaata accccctgga |
| 901 | tttgaatata attttttgtg ttgtaatttt tatttcgttt ttgtataggt tataattcac |
| 961 | atggctcaaa tattcagtga aagctctccc tccaccgcca tcccctgcta cccagtgacc |
| 1021 | ctgttgccct cttcagagac aaattagttt ctcttttttt tttttttttt tttttttttg |
| 1081 | agacagtctg gctctgtcac ccaggctgaa atgcagtggc accatctcgg ctcactgcaa |
| 1141 | cctctgcctc ctgggttcaa gcgattctcc tgcctcagcc tcccgggcag ctgggattac |
| 1201 | aggcacacac taccacacct ggctaatttt tgtattttta gtagagacag ggttttgctc |
| 1261 | tgttggccaa gctggtctcg aactcctgac ctcaagtgat ccgcccgcct c |

[0340] An exemplary human LCK amino acid sequence is set forth below (SEQ ID NO: 104; GenBank Accession No: P06239.6, Version 6, incorporated herein by reference):

| | |
|---|---|
| 1 | mgcgcsshpe ddwmenidvc enchypivpl dgkgtllirn gsevrdplvt yegsnppasp |
| 61 | lqdnlvialh syepshdgdl gfekgeqlri leqsgewwka gslttggegf ipfnfvakan |
| 121 | slepepwffk nlsrkdaerq llapgnthgs fliresesta gsfslsvrdf dqnqgevvkh |
| 181 | ykirnldngg fyispritfp glhelvrhyt nasdglctrl srpcqtqkpq kpwwedewev |
| 241 | pretlklver lgagqfgevw mgyynghtkv avkslkqgsm spdaflaean lmkqlqhqrl |
| 301 | vrlyavvtqe piyiiteyme ngslvdflkt psgikltink lldmaaqiae gmafieerny |
| 361 | ihrdlraani lvsdtlscki adfglarlie dneytarega kfpikwtape ainygtftik |
| 421 | sdvwsfgill teivthgrip ypgmtnpevi qnlergyrmv rpdncpeely qlmrlcwker |
| 481 | pedrptfdyl rsvledffta teggyqpqp |

[0341] An exemplary human LCK nucleic acid sequence is set forth below (SEQ ID NO: 105; GenBank Accession No: AH002862.2, Version 2, incorporated herein by reference):

| | |
|---|---|
| 1 | gaattcgaac tgttgcccta ctctccaacc atgattaatg ggtgttgtcc tggcctctga |
| 61 | ctacagcagg ggccgttact atgccctctt gaagacatga ggttgtcctg tctgcctcct |
| 121 | gaaacaggct gttttccagc attctgtctg taagagggat ggtagcctgc cattcaccta |
| 181 | cccttgacta taataaagct actgttccat gccctgagat gacatgggaa ttgttctctc |
| 241 | ggcctgacct gactgtaaca tgcatggtct gctcaccagc tatttaacag ggatattgtc |
| 301 | ctctcctctg actctgatac gatgctacct ttgctgccag acagaaacca aaagggtctc |
| 361 | tcagctgcaa ctggtggtgc tgaggtgctg tttgcctctc accataagct gagtgtgtgt |
| 421 | ccgcttgccc cctgctcact gggcccaaag gctgcccttg aatctcttgc ccagatgcac |
| 481 | cctggagggc agaagggagg gtctatcaga catcctcccc tcaactttaa acctcccagt |
| 541 | gtcaccctgg gacagtaggg gaagatggac ctggtctgga gatgtagggg acccccaggg |
| 601 | gctgagaggc aggggtctat ggtggcagga agcttggcgt gctagagggt tgtggttggg |
| 661 | ctgctggggc ccggttggct gcggagcctc cggaggaggc aggaagtcag ggtgggacgt |
| 721 | gggcgcgggg agacaggtgg tggctacgac ggcgaaggga gctgagactg tccaggcagc |
| 781 | caggttaggc caggaggacc atgtgaatgg ggccagaggg ctcccgggct gggcaggtaa |
| 841 | ggagcgctgg tattgggcgc aggcgccggg gtgagaggcc tgatagcaga cgctgcagnn |
| 901 | nnnnnnnnnn nnnnnnnnnn nnnnnnnnnn nnnnnnnnnn nnnnnnnnnn nnnnnnnnnn |
| 961 | nnnnnnnnnn nnnnnnnnnn nnnnnnnnnn nnnnnnnngg gactccgggg gcttcaaagt |
| 1021 | tgagggcccc acctctgctt cagcgcaaaa caggcacaca tttatcactt tactcctatg |
| 1081 | gagttctgct tgatttcatc agacaaaaaa tttccactcc taaaacacgg caaataaaca |
| 1141 | aaaaaaaagt tatggccaac cagagtcact ggagggtttt ctcctgggga gaagcaagcc |
| 1201 | cgtgtttgaa ggaaccctgt gagatgactg tgggctgtgt gaggggaaca gcgggggctt |
| 1261 | gatggtggac ttcgggagca gaagcctctt tctcagcctc ctcagctaga caggggaatt |
| 1321 | ataataggag gtgtggcgtg cacacctctc cagtagggga gggtctgata agtcaggtct |
| 1381 | ctcccaggct tgggaaagtg tgtgtcatgc tctaggaggt ggtcctccca acacagggta |
| 1441 | ctggcagagg gagagggagg gggcagaggc aggaagtggg taactagact aacaaaggtg |
| 1501 | cctgtggcgg tttgcccatc ccaggtgggg agggtggggc tagggctcag gggccgtgtg |
| 1561 | tgaatttact tgtagcctga gggctcagag ggagcaccgg tttggagctg ggacccccta |
| 1621 | ttttagcttt tctgtggctg gtgaatgggg atcccaggat ctcacaatct caggtacttt |
| 1681 | tggaactttc cagggcaagg ccccattata tctgatgttg ggggagcaga tcttggggga |
| 1741 | gccccttcag ccccctcttc cattccctca gggaccatgg gctgtggctg cagctcacac |
| 1801 | ccggaagatg actggatgga aaacatcgat gtgtgtgaga actgccatta tcccatagtc |
| 1861 | ccactggatg gcaagggcac ggtaagaggc gagacagggg ccttggtgag ggagttgggt |
| 1921 | agagaatgca acccaggaga aagaaatgac cagcacttac aggcccttga aag |

[0342] An exemplary human T cell receptor alpha amino acid sequence is set forth below (SEQ ID NO: 106; GenBank Accession No: ALC78508.1, Version 1, incorporated herein by reference):

| | |
|---|---|
| 1 | mkslrvllvi lwlqlswvws qgkeveqnsg plsvpegaia slnctysdrg sgsffwyrqy |
| 61 | sgkspelims iysngdkedg rftaqlnkas qyvsllirds qpsdsatylc avetsgtyky |
| 121 | ifgtgtrlkv laniqnpdpa vyqlrdskss dksvclftdf dsqtnvsgsk dsdvyitdkt |
| 181 | vldmrsmdfk snsavawsnk sdfacanafn nsiipedtff pspesscdvk lveksfetdt |
| 241 | nlnfqnlsvi gfrilllkva gfnllmtlrl wss |

[0343] An exemplary human T cell receptor alpha nucleic acid sequence is set forth below (SEQ ID NO: 107; GenBank Accession No: M27377.1, Version 1, incorporated herein by reference):

| | |
|---|---|
| 1 | atggcctctg cacccatctc gatgcttgcg atgctcttca cattgagtgg gctgagagct |
| 61 | cagtcagtgg ctcagcggaa gatcaggtca acgttgctga agggaatcct ctgactgtga |
| 121 | aatgcaccta ttcagtctct ggaaaccctt atcttttttg gtatgttcaa taccccaacc |
| 181 | gaggcctcca gttccttctg aaatacatca caggggataa cctggttaaa ggcagctatg |
| 241 | gctttgaagc tgaatttaac aagagccaaa cctccttcca cctgaagaaa ccatctgccc |
| 301 | ttgtgagcga ctccgctttg tacttctgtg ctgtgagacc cgacagaggc tcaaccctgg |
| 361 | ggaggctata ctttggaaga ggaactcagt tgactgtctg gcctgatatc cagaaccct |

[0344] An exemplary human T cell receptor beta amino acid sequence is set forth below (SEQ ID NO: 108; GenBank Accession No: CAA39990.1, Version 1, incorporated herein by reference):

| | |
|---|---|
| 1 | vafcllveel ieagvvqspr ykiiekkqpv afwcnpisgh ntlywylqnl gqgpelliry |
| 61 | eneeavddsq Lpkdrfsaer lkgvdstlki qpaelgdsav ylcassstgf ntgelffgeg |
| 121 | srltvledlk nvfppevavf |

[0345] An exemplary human T cell receptor beta nucleic acid sequence is set forth below (SEQ ID NO: 109; GenBank Accession No: L06888.1, Version 1, incorporated herein by reference):

| | |
|---|---|
| 1 | atgggctgca ggctgctctg ctgtgcggtt ctctgtctcc tgggagcggt ccccatggaa |
| 61 | acgggagtta cgcagacacc aagacacctg gtcatgggaa tgacaaataa gaagtctttg |
| 121 | aaatgtgaac aacatctggg tcataacgct atgtattggt acaagcaaag tgctaagaag |
| 181 | ccactggagc tcatgtttgt ctacagtctt gaagaacgtg ttgaaaacaa cagtgtgcca |
| 241 | agtcgcttct cacctgaatg ccccaacagc tctcacttat tccttcacct acacaccctg |
| 301 | cagccagaag actcggccct gtatctctgc gccagcagc |

[0346] An exemplary human GNLY amino acid sequence is set forth below (SEQ ID NO: 110; GenBank Accession No: CAG46657.1, Version 1, incorporated herein by reference):

| | |
|---|---|
| 1 | matwalllla amllgnpglv fsrlspeyyd larahlrdee kscpclaqeg pqgdlltktq |
| 61 | elgrdyrtcl tivqklkkmv dkptqrsysn aatrvcrtgr srwrdvcrnf mrryqsrvtq |
| 121 | glvagetaqq icedlrlcip stgpl |

[0347] An exemplary human GNLY nucleic acid sequence is set forth below (SEQ ID NO: 111; GenBank Accession No: NM_001302758.1, Version 1, incorporated herein by reference):

| | |
|---|---|
| 1 | gtatctgtgg taaacccagt gacacggggg agatgacata caaaaagggc aggacctgag |
| 61 | aaagattaag ctgcaggctc cctgcccata aaacagggtg tgaaaggcat ctcagcggct |
| 121 | gccccaccat ggctacctgg gccctcctgc tccttgcagc catgctcctg ggcaacccag |
| 181 | gccttgaggt cagtgtgagc cccaagggca agaacacttc tggaagggag agtggatttg |
| 241 | gctgggccat ctggatggaa ggtctggtct tctctcgtct gagccctgag tactacgacc |
| 301 | tggcaagagc ccacctgcgt gatgaggaga aatcctgccc gtgcctggcc caggagggcc |
| 361 | cccagggtga cctgttgacc aaaacacagg agctgggccg tgactacagg acctgtctga |
| 421 | cgatagtcca aaaactgaag aagatggtgg ataagcccac ccagagaagt gtttccaatg |
| 481 | ctgcgacccg ggtgtgtagg acggggaggt cacgatggcg cgacgtctgc agaaatttca |
| 541 | tgaggaggta tcagtctaga gttacccagg gcctcgtggc cggagaaact gcccagcaga |
| 601 | tctgtgagga cctcaggttg tgtatacctt ctacaggtcc cctctgagcc ctctcacctt |
| 661 | gtcctgtgga agaagcacag gctcctgtcc tcagatcccg ggaacctcag caacctctgc |
| 721 | cggctcctcg cttcctcgat ccagaatcca ctctccagtc tccctcccct gactccctct |
| 781 | gctgtcctcc cctctcacga gaataaagtg tcaagcaaga ttttagccgc agctgcttct |
| 841 | tctttggtgg atttgagggg tgggtgtcag tggcatgctg gggtgagctg tgtagtcctt |
| 901 | caataaatgt ctgtcgtgtg tccc |

[0348] An exemplary human GZMA amino acid sequence is set forth below (SEQ ID NO: 112; GenBank Accession No: CAG33249.1, Version 1, incorporated herein by reference):

| | |
|---|---|
| 1 | mrnsyrflas slsvvvslll ipedvcekii ggnevtphsr pymvllsldr kticagalia |
| 61 | kdwvltaahc nlnkrsqvil gahsitreep tkqimlvkke fpypcydpat regdlkllql |
| 121 | tekakinkyv tilhlpkkgd dvkpgtmcqv agwgrthnsa swsdtlrevn itiidrkvcn |
| 181 | drnhynfnpv igmnmvcags lrggrdscng dsgspllceg vfrgvtsfgl enkcgdprgp |
| 241 | gvyillskkh lnwiimtikg av |

[0349] An exemplary human GZMA nucleic acid sequence is set forth below (SEQ ID NO: 113; GenBank Accession No: NM_006144.3, Version 3, incorporated herein by reference):

| | |
|---|---|
| 1 | agattttcag gttgattgat gtgggacagc agccacaatg aggaactcct atagatttct |
| 61 | ggcatcctct ctctcagttg tcgtttctct cctgctaatt cctgaagatg tctgtgaaaa |
| 121 | aattattgga ggaaatgaag taactcctca ttcaagaccc tacatggtcc tacttagtct |
| 181 | tgacagaaaa accatctgtg ctggggcttt gattgcaaaa gactgggtgt tgactgcagc |
| 241 | tcactgtaac ttgaacaaaa ggtcccaggt cattcttggg gctcactcaa taaccaggga |
| 301 | agagccaaca aaacagataa tgcttgttaa gaaagagttt ccctatccat gctatgaccc |
| 361 | agccacacgc gaaggtgacc ttaaactttt acagctgacg gaaaaagcaa aaattaacaa |
| 421 | atatgtgact atccttcatc tacctaaaaa gggggatgat gtgaaaccag gaaccatgtg |
| 481 | ccaagttgca gggtggggca ggactcacaa tagtgcatct tggtccgata ctctgagaga |
| 541 | agtcaatatc accatcatag acagaaaagt ctgcaatgat cgaaatcact ataattttaa |
| 601 | ccctgtgatt ggaatgaata tggtttgtgc tggaagcctc cgaggtggaa gagactcgtg |
| 661 | caatggagat tctggaagcc ctttgttgtg cgagggtgtt ttccgagggg tcacttcctt |
| 721 | tggccttgaa aataaatgcg gagaccctcg tgggcctggt gtctatattc ttctctcaaa |
| 781 | gaaacacctc aactggataa ttatgactat caagggagca gtttaaataa ccgtttcctt |
| 841 | tcatttactg tggcttctta atcttttcac aaataaaatc aatttgcatg actgtaaaaa |
| 901 | aaaaaaaaaa aaa |

[0350] An exemplary human GZMB amino acid sequence is set forth below (SEQ ID NO: 114; GenBank Accession No: P10144.2, Version 2, incorporated herein by reference):

| | |
|---|---|
| 1 | mqpillllaf lllpradage iiggheakph srpymaylmi wdqkslkrcg gflirddfvl |
| 61 | taahcwgssi nvtlgahnik eqeptqqfip vkrpiphpay npknfsndim llqlerkakr |
| 121 | travqplrlp snkaqvkpgq tcsvagwgqt aplgkhshtl qevkmtvqed rkcesdlrhy |
| 181 | ydstielcvg dpeikktsfk gdsggplvcn kvaqgivsyg rnngmpprac tkvssfvhwi |
| 241 | kktmkry |

[0351] An exemplary human GZMB nucleic acid sequence is set forth below (SEQ ID NO: 115; GenBank Accession No: NM_004131.4, Version 4, incorporated herein by reference):

| | |
|---|---|
| 1 | ccaagagcta aaagagagca aggaggaaac aacagcagct ccaaccaggg cagccttcct |
| 61 | gagaagatgc aaccaatcct gcttctgctg gccttcctcc tgctgcccag ggcagatgca |
| 121 | ggggagatca tcgggggaca tgaggccaag ccccactccc gcccctacat ggcttatctt |
| 181 | atgatctggg atcagaagtc tctgaagagg tgcggtggct tcctgatacg agacgacttc |
| 241 | gtgctgacag ctgctcactg ttggggaagc tccataaatg tcaccttggg ggcccacaat |
| 301 | atcaaagaac aggagccgac ccagcagttt atccctgtga aaagacccat cccccatcca |
| 361 | gcctataatc ctaagaactt ctccaacgac atcatgctac tgcagctgga gagaaaggcc |
| 421 | aagcggacca gagctgtgca gcccctcagg ctacctagca acaaggccca ggtgaagcca |
| 481 | gggcagacat gcagtgtggc cggctggggg cagacggccc ccctgggaaa acactcacac |
| 541 | acactacaag aggtgaagat gacagtgcag gaagatcgaa agtgcgaatc tgacttacgc |
| 601 | cattattacg acagtaccat tgagttgtgc gtgggggacc cagagattaa aaagacttcc |
| 661 | tttaaggggg actctggagg ccctcttgtg tgtaacaagg tggcccaggg cattgtctcc |
| 721 | tatggacgaa acaatggcat gcctccacga gcctgcacca aagtctcaag ctttgtacac |
| 781 | tggataaaga aaaccatgaa acgctactaa ctacaggaag caaactaagc ccccgctgta |
| 841 | atgaaacacc ttctctggag ccaagtccag atttacactg ggagaggtgc cagcaactga |
| 901 | ataaatacct cttagctgag tggaaaaaaa aaaaaaaaaa a |

[0352] An exemplary human GZMH amino acid sequence is set forth below (SEQ ID NO: 116; GenBank Accession No: P20718.1, Version 1, incorporated herein by reference):

| | |
|---|---|
| 1 | mqpfllllaf lltpgagtee iiggheakph srpymafvqf lqeksrkrcg gilvrkdfvl |
| 61 | taahcqgssi nvtlgahnik eqertqqfip vkrpiphpay npknfsndim llqlerkakw |
| 121 | ttavrplrlp sskaqvkpgq lcsvagwgyv smstlattlq evlltvqkdc qcerlfhgny |
| 181 | srateicvgd pkktqtgfkg dsggplvckd vaqgilsygn kkgtppgvyi kvshflpwik |
| 241 | rtmkrl |

[0353] An exemplary human GZMH nucleic acid sequence is set forth below (SEQ ID NO: 117; GenBank Accession No: NM_033423.4, Version 4, incorporated herein by reference):

| | |
|---|---|
| 1 | gaggtctctg agtttactgt acccatccct ccttcatctc cctccagcat ttgtttctgg |
| 61 | aaggagtcaa caccaacagc tctgacctgg gcagccttcc tgagaaaatg cagccattcc |
| 121 | tcctcctgtt ggcctttctt ctgacccctg gggctgggac agaggagatc atcgggggcc |
| 181 | atgaggccaa gccccactcc cgcccctaca tggcctttgt tcagtttctg caagagaaga |
| 241 | gtcggaagag gtgtggcggc atcctagtga gaaaggactt tgtgctgaca gctgctcact |
| 301 | gccagggaag ctccataaat gtcaccttgg gggcccacaa tatcaaggaa caggagcgga |
| 361 | cccagcagtt tatccctgtg aaaagaccca tcccccatcc agcctataat cctaagaact |
| 421 | tctccaacga catcatgcta ctgcagctgg agagaaaggc caagtggacc acagctgtgc |
| 481 | ggcctctcag gctacctagc agcaaggccc aggtgaagcc agggcagctg tgcagtgtgg |
| 541 | ctggctgggg ttatgtctca atgagcactt tagcaaccac actgcaggaa gtgttgctga |
| 601 | cagtgcagaa ggactgccag tgtgaacgtc tcttccatgg caattacagc agagccactg |
| 661 | agatttgtgt gggggatcca aagaagacac agaccggttt caagggggac tccggggggc |
| 721 | ccctcgtgtg taaggacgta gcccaaggta ttctctccta tggaaacaaa aaagggacac |
| 781 | ctccaggagt ctacatcaag gtctcacact tcctgccctg gataaagaga acaatgaagc |
| 841 | gcctctaaca gcaggcatga gactaacctt cctctgggcc tgaccatctc tgggacagag |
| 901 | gcaagaatcc ccaaggggtg ggcagtcggg gttgcaggac tgtaataaat ggatctctgg |
| 961 | tgtaaatatg aaaaaaaaaa aaaaaaa |

[0354] An exemplary human GZMK amino acid sequence is set forth below (SEQ ID NO: 118; GenBank Accession No: P49863.1, Version 1, incorporated herein by reference):

| | |
|---|---|
| 1 | mtkfssfslf flivgaymth vcfnmeiigg kevsphsrpf masiqygghh vcggvlidpq |
| 61 | wvltaahcqy rftkgqsptv vlgahslskn easkqtleik kfipfsrvts dpqsndimlv |
| 121 | klqtaaklnk hvkmlhirsk tslrsgtkck vtgwgatdpd slrpsdtlre vtvtvlsrkl |
| 181 | cnsqsyyngd pfitkdmvca gdakgqkdsc kgdsggplic kgvfhaivsg ghecgvatkp |
| 241 | giytlltkky qtwiksnlvp phtn |

[0355] An exemplary human GZMK nucleic acid sequence is set forth below (SEQ ID NO: 119; GenBank Accession No: NM_002104.2, Version 2, incorporated herein by reference):

| | |
|---|---|
| 1 | gatcaacaca tttcatctgg gcttcttaaa tctaaatctt taaaatgact aagttttctt |
| 61 | ccttttctct gtttttccta atagttgggg cttatatgac tcatgtgtgt ttcaatatgg |
| 121 | aaattattgg agggaaagaa gtgtcacctc attccaggcc atttatggcc tccatccagt |
| 181 | atggcggaca tcacgtttgt ggaggtgttc tgattgatcc acagtgggtg ctgacagcag |
| 241 | cccactgcca atatcggttt accaaaggcc agtctcccac tgtggtttta ggcgcacact |
| 301 | ctctctcaaa gaatgaggcc tccaaacaaa cactggagat caaaaaattt ataccattct |
| 361 | caagagttac atcagatcct caatcaaatg atatcatgct ggttaagctt caaacagccg |
| 421 | caaaactcaa taaacatgtc aagatgctcc acataagatc caaaacctct cttagatctg |
| 481 | gaaccaaatg caaggttact ggctggggag ccaccgatcc agattcatta agaccttctg |
| 541 | acaccctgcg agaagtcact gttactgtcc taagtcgaaa actttgcaac agccaaagtt |
| 601 | actacaacgg cgaccctttt atcaccaaag acatggtctg tgcaggagat gccaaaggcc |
| 661 | agaaggattc ctgtaagggt gactcagggg gccccttgat ctgtaaaggt gtcttccacg |
| 721 | ctatagtctc tggaggtcat gaatgtggtg ttgccacaaa gcctggaatc tacaccctgt |
| 781 | taaccaagaa ataccagact tggatcaaaa gcaaccttgt cccgcctcat acaaattaag |
| 841 | ttacaaataa ttttattgga tgcacttgct tcttttttcc taatatgctc gcaggttaga |
| 901 | gttgggtgta agtaaagcag agcacatatg gggtccattt ttgcacttgt aagtcatttt |
| 961 | attaaggaat caagttcttt ttcacttgta tcactgatgt atttctacca tgctggtttt |
| 1021 | attctaaata aaatttagaa gactcaaaaa aaaaaaaaaa aaaaaaaaaa aaaa |

[0356] An exemplary human PRF1 amino acid sequence is set forth below (SEQ ID NO: 120; GenBank Accession No: P14222.1, Version 1, incorporated herein by reference):

| | |
|---|---|
| 1 | maarllllgi lllllplpvp apchtaarse ckrshkfvpg awlagegvdv tslrrsgsfp |
| 61 | vdtqrflrpd gtctlcenal qegtlqrlpl altnwraqgs gcqrhvtrak vssteavard |
| 121 | aarsirndwk vgldvtpkpt snvhvsvags hsqaanfaaq kthqdqysfs tdtvecrfys |
| 181 | fhvvhtpplh pdfkralgdl phhfnastqp aylrlisnyg thfiravelg grisaltalr |
| 241 | tcelaleglt dnevedcltv eaqvnigihg sisaeakace ekkkkhkmta sfhqtyrerh |
| 301 | sevvgghhts indllfgiqa gpeqysawvn slpgspglvd ytleplhvll dsqdprreal |
| 361 | rralsqyltd rarwrdcsrp cppgrqkspr dpcqcvchgs avttqdccpr qrglaqlevt |
| 421 | fiqawglwgd wftatdayvk lffggqelrt stvwdnnnpi wsvrldfgdv llatggplrl |
| 481 | qvwdqdsgrd ddllgtcdqa pksgshevrc nlnhghlkfr yharclphlg ggtcldyvpq |
| 541 | mllgeppgnr sgavw |

[0357] An exemplary human PRF1 nucleic acid sequence is set forth below (SEQ ID NO: 121; GenBank Accession No: M31951.1, Version 1, incorporated herein by reference):

| | |
|---|---|
| 1 | gaattccaaa gtcctctctt tgattttata ggtgaggaaa ctaacgctca gaaagggggt |
| 61 | tgatatctat cgccgtgagg catacggtaa gtttctggtg aagctgggat cagaacctgt |
| 121 | ttagactttg cctctctttt cccgcagata ctttgcagga cttctatgtc cctcaaaccg |
| 181 | gccttcctgt catggtcagg aaagaaactc ctcacagcct cagcatccaa gtcaggccat |
| 241 | gggtgacagc tggaaagtga tcaggaggct gcagtttcta gaagagggtg gggacactgc |
| 301 | ggagagaaga tggggccaga ttccgagaag acagcataag cccctgttcc tgtaagagca |
| 361 | gggacggaag cagggacata aacgcaaggg atgagcccca aagtgtgacc catgagacat |
| 421 | gatgtcacat gtggtctgga gcctgcccca cttcttccca tcatatacac agttatgaga |
| 481 | acaagttgtg agaaccacct cctcccttac ccagctgccc ccaccccaga agccgtgtga |
| 541 | ttttgccccc cagtgccctg tgagtcactc cacccatgga aacctcaccc caccctgacc |
| 601 | tcaagcaagg cagagtgcag aagacatgtc ctccggtgct accagaccac tctcaccagc |
| 661 | acccacgacc tcagcagggc tggagccagc gtggaggcca ctggctgtcc tcacaaagcg |
| 721 | aggagcagga gcccctgttc gaggaacatg cttggagttc ggagcctggg ctagggtggg |
| 781 | atgtaggttg agcaggaagt ggatggcaag attagagcaa catctctctt ctcccactca |
| 841 | gggaggaggg aatggccaca ggctctgaca ctcaagaagg gccaggcaca gttccaagca |
| 901 | cttcacaaca acccctaggg tctacatgac ctacaatccc aattgttcag tgaagaaact |
| 961 | gaggcacagt gaggctgaag aaccctacca gtccacactg ctggtgcata accgagctgc |
| 1021 | ccaagccccg gcggtctggc gtgtaggccc atgctctgag ccgccgcctc tgcttgcctc |
| 1081 | ttacatccca cacatgcgat gctgtgcatc agaagcaagg agatggccct gctggcctgt |
| 1141 | tcatcaacac cagggccgag tctcaaagtc ctcagcgccc cgccctcctc cgcctgtgtg |
| 1201 | ccctgagtcc ccgagcccca gcagctctac tcggcagatg agcctctggc cctgctgctc |
| 1261 | gcttcctgag ggctgtcagt ggggagccgg atgagggctg aggacagggt gggtgctcgt |
| 1321 | gggaggggag agcacaaagg acctgtgacc acagctgggg gcggggcagg aagtagaagt |
| 1381 | gatgtgagtg gtggctggtg caaggagcca cagtgggctg cctggggggc tgatgccacc |
| 1441 | attccaggag cctcggtgaa gagaggatat ccatctgtgt agccgcttct ctatacggga |
| 1501 | ttccaggtaa ggagagagca gggattgggg gcctggggcc ctgggtggag gggaagaggc |
| 1561 | tgatggagca ggaagtgctg tgacctataa gacaagacac ctgggtcaca gacggtgccc |
| 1621 | atcactaact cgctgggcag ccctgtgtcc accctgggcc tcagtttcct catgtatgaa |
| 1681 | atgaagaggt agcgtgcagt ttctaaggcc ctgcaagtgc tgacattaaa gcttctaaga |
| 1741 | aagctggaaa gaggctccct gggacagaat accatgagag tcaggatgag ggctgagttc |
| 1801 | actggattag ggttatgact gtgcccgcct cctagctggg atgagcccag ggcctttgaa |
| 1861 | gattcccctg gcctctttgc ctccctgggg cgagccacgc tgcctgaaat tccacccttc |
| 1921 | aagtcacacc tttgggcagg gcaggaggct ccagctataa tgggggctct ccatagccct |
| 1981 | cttgtctcag aacctgtggt acccaagggc aaaggccttt gaagagctca gcttggataa |
| 2041 | ggttaggctt gggtaaggtt agagaaagga ggttccagat cataaacagg cccaggcaag |
| 2101 | gccccagaaa caccttaaaa ttaggaagaa ccttccagac aatcattgtc catagtaggc |
| 2161 | aatagggggg cccctgtcac tgccgaaggc cacagagctt ggcagggagt ggcaaagagg |
| 2221 | ggaggggcag caagaaagga tctgaagagc aaccatcgag gcctctcccc acacaaaatc |
| 2281 | caagggtgtg gtcaggtctg cccctttttc ttttttttct ttctcttttt tttttttttt |
| 2341 | tttttttgag gcagagtctt actctatcac ccaggcggga gtgcagtggt acgatcttgg |
| 2401 | ctcactgcaa cctccgcctc ctgggttcaa gcgattctcc tgtctcagcc tcccaagtag |
| 2461 | ctgggattac aggcacccgc caccatgccc agctaatttt tgtattttta gtaaagaggg |
| 2521 | ggtttcacca cgttggccag gctggtctcg aacttctgac ctccagtgat ccacctgcct |
| 2581 | ctgcctccca cagtgttcgg tttacaggtg tgagccacca cacctggcca ggtcggcaga |
| 2641 | ttttattcta gaattcgggc tgatgttatt ccataaagct cagagggaga gcgccaaagg |
| 2701 | gaaaatgaga agaataggtg caatatagga cctcatttct cttccaattc tgttaagggc |
| 2761 | tcagtgggag ggagagaggt tagagagagt gacagagaca aagaaacaga gtgagagtca |
| 2821 | gggtgggcaa agggtggctt gttctggggc caaaaatgac acttcttcag aatgaaggct |
| 2881 | tcctcaggtc cccagacccc tccctaaacc tgctacagct actctgtccc ctcttctgtg |
| 2941 | gccacagccc cctccccacc acccacagtt gtgtcctggg gacagagcca tccacctaga |
| 3001 | tccccattag gccttaggga aattctaaaa aggggctccc cttggctggg cttttcccct |
| 3061 | ctctgggccc atctgtacaa tgtgggggct gaaccaggcc tataagggac ataccagctc |
| 3121 | tgacattcat tgaataatga cttaagagat atctcagccc ctccccttcc atgtgccctg |
| 3181 | ataatctgtg gctgtggggg aagggagcag tcatcctcca tccctccacc catggcttcc |
| 3241 | cagagcccaa gtgccccctg tctctgcagc tccatggcag cccgtctgct cctcctgggc |
| 3301 | atccttctcc tgctgctgcc cctgcccgtc cctgccccgt gccacacagc cgcacgctca |
| 3361 | gagtgcaagc gcagccacaa gttcgtgcct ggtgcatggc tggccgggga gggtgtggac |
| 3421 | gtgaccagcc tccgccgctc gggctccttc ccagtggaca cacaaaggtt cctgcggccc |
| 3481 | gacggcacct gcaccctctg tgaaaatgcc ctacaggagg gcaccctcca gcgcctgcct |
| 3541 | ctggcgctca ccaactggcg ggcccagggc tctggctgcc agcgccatgt aaccagggcc |
| 3601 | aaagtcagct ccactgaagc tgtggcccgg gatgcggctc gtagcatccg caacgactgg |
| 3661 | aaggtcgggc tggacgtgac tcctaagccc accagcaatg tgcatgtgtc tgtggccggc |
| 3721 | tcacactcac aggcagccaa ctttgcagcc cagaagaccc accaggacca gtacagcttc |
| 3781 | agcactgaca cggtggagtg ccgcttctac aggtgagagc tggggctagg ggtggggggc |
| 3841 | tggaaaaggc gcgggaaact ctgggtggtc taagagccct ggaaaggcag agttctccaa |
| 3901 | tcaaacttgg aggctgcttc caccaggaag aaactgcaat cctggctctc agacttcagg |
| 3961 | tgattcagcc ctgtggcctc ctctcatcca ggaggtccca aatctgggag tgcccagtga |
| 4021 | gacatcaagt agagagaaag tgagtgagac catgcctgag agtcccagca gggtgccatt |
| 4081 | taggtctagt gagtactgaa ccctgccttt cctgggcaca gccagccttc cacagagtcc |
| 4141 | ttcctggata gggacagagg caggagacct ggccgggtca tccttcctca tcgctgtgtg |
| 4201 | accttgagca tctcacttct ctctgagctt caatcatcca ctcaaccaat actcacacct |
| 4261 | gcctgtggca gggccacact gctgagcgac agcagtcact accctagccc ctgggagtag |
| 4321 | gaagtatggg acccatattc cacgtctgag aaaggcacag tgtttgtagg ccagacccaa |
| 4381 | gtcacctggt ctgattcatc agacctgggg gccacgtttc ctccacagag aggccgagca |
| 4441 | tggcccaagc tgtcaggatc ccgggcatgt gggacccatc cagggggacg gatggatgaa |
| 4501 | ggccacatga ctagttccaa agttcgacag ataccatcag tgcaggatca ttgcttttat |
| 4561 | gttctttttt actttttctt aaaaaaaaaa tagagatggg gtctcactat gttgcccagg |
| 4621 | ctggtctcaa actcctgggc tcaagtgatc ctcccgcctc ggcctcccaa agtgctgggg |
| 4681 | ttacaggcat gaaccactgc tcccggccag gatcattgct tttataataa gaaaattaaa |
| 4741 | aggaaagaaa aaaatgttat tttgaaaagg aaaagagaaa atacctatac agagcactga |
| 4801 | ggtccctgag gggtgagagc ggaggcattc ctgccagccc cgtgccactg tgcttgtgct |
| 4861 | ctggagccgg gcccctgggt tccagtccta gttctgccca cttacatgtg accttgagca |
| 4921 | gtcctgaagg agttatttga ttgaatgggg gaaatactcc cctgggccca gctgaggtct |
| 4981 | ctctcttctc gcagtttcca tgtggtacac actcccccgc tgcaccctga cttcaagagg |
| 5041 | gccctcgggg acctgcccca ccacttcaac gcctccaccc agcccgccta cctcaggctt |
| 5101 | atctccaact acggcaccca cttcatccgg gctgtggagc tgggtggccg catatcggcc |
| 5161 | ctcactgccc tgcgcacctg cgagctggcc ctggaagggc tcacggacaa cgaggtggag |
| 5221 | gactgcctga ctgtcgaggc ccaggtcaac ataggcatcc acggcagcat ctctgccgaa |
| 5281 | gccaaggcct gtgaggagaa gaagaagaag cacaagatga cggcctcctt ccaccaaacc |
| 5341 | taccgggagc gccactcgga agtggttggc ggccatcaca cctccattaa cgacctgctg |
| 5401 | ttcgggatcc aggccgggcc cgagcagtac tcagcctggg taaactcgct gcccggcagc |
| 5461 | cctggcctgg tggactacac cctggaaccc ctgcacgtgc tgctggacag ccaggacccg |
| 5521 | cggcgggagg cactgaggag ggccctgagt cagtacctga cggacagggc tcgctggagg |
| 5581 | gactgcagcc ggccgtgccc accagggcgg cagaagagcc cccgagaccc atgccagtgt |
| 5641 | gtgtgccatg gctcagcggt caccacccag gactgctgcc ctcggcagag gggcctggcc |
| 5701 | cagctggagg tgaccttcat ccaagcatgg ggcctgtggg gggactggtt cactgccacg |
| 5761 | gatgcctatg tgaagctctt ctttggtggc caggagctga ggacgagcac cgtgtgggac |
| 5821 | aataacaacc ccatctggtc agtgcggctg gattttgggg atgtgctcct ggccacaggg |
| 5881 | gggcccctga ggttgcaggt ctgggatcag gactctggca gggacgatga cctccttggc |
| 5941 | acctgtgatc aggctcccaa gtctggttcc catgaggtga gatgcaacct gaatcatggc |
| 6001 | cacctaaaat tccgctatca tgccaggtgc ttgccccacc tgggaggagg cacctgcctg |
| 6061 | gactatgtcc cccaaatgct tctgggggag cctccaggaa accggagtgg ggccgtgtgg |
| 6121 | tgagaacagt gagcttggaa aggaccagta tgcttggact gaaggggttc tcacagtggg |
| 6181 | agccagggct gtcttcgtat tcccattaga ccaagctt |

[0358] An exemplary human CD19 amino acid sequence is set forth below (SEQ ID NO: 122; GenBank Accession No: AAB60697.1, Version 1, incorporated herein by reference):

| | |
|---|---|
| 1 | mppprllffl lfltpmevrp eeplvvkveg egdnavlqcl kgtsdgptqq ltwsresplk |
| 61 | pflklslglp glgihmrpla swlfifnvsq qmggfylcqp gppsekawqp gwtvnvegsg |
| 121 | elfrwnvsdl gglgcglknr ssegpsspsg klmspklyvw akdrpeiweg eppcvpprds |
| 181 | lnqslsqdlt mapgstlwls cgvppdsvsr gplswthvhp kgpksllsle lkddrpardm |
| 241 | wvmetglllp rataqdagky ychrgnltms fhleitarpv lwhwllrtgg wkvsavtlay |
| 301 | lifclcslvg ilhlgralvl rrkrkrmtdp trrffkvtpp pgsgpqnqyg nvlslptpts |
| 361 | glgraqrwaa glggtapsyg npssdvqadg algsrsppgv gpeeeegegy eepdseedse |
| 421 | fyendsnlgq dqlsqdgsgy enpedeplgp ededsfsnae syenedeelt qpvartmdfl |
| 481 | sphgsawdps reatslgsqs yedmrgilya apqlrsirgq pgpnheedad syenmdnpdg |
| 541 | pdpawggggr mgtwstr |

[0359] An exemplary human CD19 nucleic acid sequence is set forth below (SEQ ID NO: 123; GenBank Accession No: M84371.1, Version 1, incorporated herein by reference):

| | |
|---|---|
| 1 | ggatcctctc gcctcggcct cctaaagtat tgggattaca |
| | ggcatgagcc tctgtgcctg |
| 61 | gctgtaactg acatgtttta agcaggggaa tgacatgctc |
| | tagtgaaagc cagtctgggc |
| 121 | agctgggtag ctaatgaggg gattagagag attttgttga |
| | atgaaaggca gattgagtcc |
| 181 | tgctactcgc ccccttcatt ccccttcatt catgcctcat |
| | tcttccgcct cccagccgcc |
| 241 | tcaactggcc aaagggaagt ggaggccctg ccacctgtag |
| | ggagggtccc ctggggcttg |
| 301 | cccacagcaa acaggaagtc acagcctggt gagatgggcc |
| | tgggaatcag ccactgagaa |
| 361 | agtgggtctc ttgggtccct gaattctttt tctgagtccc |
| | tgcagcagtg aaaaagacac |
| 421 | agaggcacat agagagtgac agagaaagag agagacagag |
| | aggagaggca tggggcagaa |
| 481 | taagaacaga tttaggagtt agaactcctg ggttctttta |
| | aaacaatttt tcttttagag |
| 541 | acagggtctt gttgtgttgc ccggactgga gcacagtggc |
| | tattcccagg cataatcatg |
| 601 | gtgcactgca gccttgaact cctgggctca agcgatcctt |
| | ctacctcagc ctcccaagga |
| 661 | cctgggacca taggcgtgta ccactgtgcc tggcttttgc |
| | ctggttttaa actgaggcag |
| 721 | tatgacttga gctcttaggc attaattgaa gctgtatctc |
| | attaactgag ggcttatgat |
| 781 | gtgctggaca ctgggctaat agtgctgaac atattgtcat |
| | ttttaatctt cacaaacaat |
| 841 | atttgtatag gactgttttc ttttcttttt tttttttgaa |
| | acagagtctc actctggtgc |
| 901 | ccaggctgga gtgcagtggt gtgatctcgg ctcactgcaa |
| | cctccgcctc ctggtttcca |
| 961 | gtgattctcc tgcctcagcc tcctaagtag ctgggattac |
| | aggtgtgcgc caccatgccc |
| 1021 | ggctaatttt tttttttttt tttgagaagg agtctatgtg |
| | cccagcattg ttctagagca |
| 1081 | cttgcaatta gtggtgaaca acacggtctc tactccaagg |
| | ggctcacatt cttgtgcaga |
| 1141 | aaacagaaat gaacaaataa acacacaaga tcatttcccg |
| | tggtagtgag agctgggatg |
| 1201 | aaaataaaac agcgtggcag ggaggaggca agtgttgtga |
| | gtctggaggg ttcctggaga |
| 1261 | atggggcctg aggcgtgacc accgccttcc tctctggggg |
| | gactgcctgc cgcccccgca |
| 1321 | gacacccatg gttgagtgcc ctccaggccc ctgcctgccc |
| | cagcatcccc tgcgcgaagc |
| 1381 | tgggtgcccc ggagagtctg accaccatgc cacctcctcg |
| | cctcctcttc ttcctcctct |
| 1441 | tcctcacccc catggaagtc aggcccgagg aacctctagt |
| | ggtgaaggtg gaaggtatgt |
| 1501 | ccaaagggca gaaagggaag ggattgaggc tggaaacttg |
| | agttgtggct gggtgtcctt |
| 1561 | ggctgagtaa cttaccctct ctgagcctcc attttcttat |
| | ttgtaaaatt caggaaaggg |
| 1621 | ttggaaggac tctgccggct cctccactcc cagcttttgg |
| | agtcctctgc tctataacct |
| 1681 | ggtgtgagga gtcggggggc ttggaggtcc cccccaccca |
| | tgcccacacc tctctccctc |
| 1741 | tctctccaca gagggagata acgctgtgct gcagtgcctc |
| | aaggggacct cagatggccc |
| 1801 | cactcagcag ctgacctggt ctcgggagtc cccgcttaaa |
| | cccttcttaa aactcagcct |
| 1861 | ggggctgcca ggcctgggaa tccacatgag gcccctggca |
| | tcctggcttt tcatcttcaa |
| 1921 | cgtctctcaa cagatggggg gcttctacct gtgccagccg |
| | gggcccccct ctgagaaggc |
| 1981 | ctggcagcct ggctggacag tcaatgtgga gggcagcggt |
| | gagggccggg ctggggcagg |
| 2041 | ggcaggagga gagaagggag gccaccatgg acagaagagg |
| | tccgcggcca caatggagct |
| 2101 | ggagagaggg gctggaggga ttgagggcga aactcggagc |
| | taggtgggca gactcctggg |
| 2161 | gcttcgtggc ttcagtatga gctgcttcct gtccctctac |
| | ctctcactgt cttctctctc |
| 2221 | tctgcgggtc tttgtctcta tttatctctg tctttgagtc |
| | tctatctctc tccctctcct |
| 2281 | gggtgtctct gcatttggtt ctgggtctct tcccagggga |
| | gctgttccgg tggaatgttt |
| 2341 | cggacctagg tggcctgggc tgtggcctga agaacaggtc |
| | ctcagagggc cccagctccc |
| 2401 | cttccgggaa gctcatgagc cccaagctgt atgtgtgggc |
| | caaagaccgc cctgagatct |
| 2461 | gggagggaga gcctccgtgt gtcccaccga gggacagcct |
| | gaaccagagc ctcagccagg |
| 2521 | gtatggtgat gactggggag atgccgggaa gcgggggtcc |
| | agagacagag gggaggggaa |
| 2581 | actgaagagg tgaaaccctg aggatcaggc tttccttgtc |
| | ttatctctcc ctgtcccaga |
| 2641 | cctcaccatg gcccctggct ccacactctg gctgtcctgt |
| | ggggtacccc ctgactctgt |
| 2701 | gtccaggggc cccctctcct ggacccatgt gcaccccaag |
| | gggcctaagt cattgctgag |
| 2761 | cctagagctg aaggacgatc gcccggccag agatatgtgg |
| | gtaatggaga cgggtctgtt |
| 2821 | gttgccccgg gccacagctc aagacgctgg aaagtattat |
| | tgtcaccgtg gcaacctgac |
| 2881 | catgtcattc cacctggaga tcactgctcg gccaggtaga |
| | gtttctctca actgggaggc |
| 2941 | atctgtgtgg gggtactggg aagaagtgga agccagtcaa |
| | tcttagattc ccccaacccg |
| 3001 | agggctactc ccagcctcac cccaaacccc aacttccaca |
| | cagaacactg actccaagtc |
| 3061 | tttctttttt ttgacagagt ctcgctctgt tgcctaggct |
| | ggagtgcagt ggtgccatct |
| 3121 | tgtcttggct cactgcaacc tccgcctccc aggttcaagt |
| | gattcccctg cctcagcctc |
| 3181 | ctgagtagct gggattacag gtgcccacca ccacgcctgg |
| | ctaatttttt tttttttttt |
| 3241 | gagacggagt cttgcactgt cacccaggct ggagtgcagt |
| | ggcacgatct cagctcactg |
| 3301 | caacctccac cttccaggtt caagtgattc tcctgcctca |
| | gcctcccgag tagctgggat |
| 3361 | taaagcctgg ctaatttttt ttgtattttt agtagagatg |
| | gggtttcatt atgttggcca |
| 3421 | ggctggtctc aaactcctga cctcgtgatc cacccgcctc |
| | ggcctcccaa agtgctggga |
| 3481 | ttacagacat gagccacagg gccgggccaa gcctaatttt |
| | gtatttttag tagagatggg |
| 3541 | gtttctccct gttggaccag gctggtcttg aactcctgac |
| | ttcaggtgat ctgcctgcct |
| 3601 | tggcctccca aagtactggg attacaggca taagccaccg |
| | cacctggcct agacttcaag |
| 3661 | tctttcttcc ctcgcttcca agacactact tttctgggtc |
| | ttcacctacc attgcttgcg |
| 3721 | cctgcccacc agcttgggtg gagtcttcct tcctccccaa |
| | ctcctcactc ttggagccct |
| 3781 | gggccctctt cttatccctg tctgcacact ttcctatttg |
| | aacttgactc tcaatggctt |
| 3841 | cttgggtcac catgccttgg tgactctatt ccaggctcca |
| | tactcagcca tctcctgtgc |
| 3901 | catttgatat cccatggaca cctcaggctc aacagataca |
| | aaatcaaact caatgtcttc |
| 3961 | cccaagtata gtcttcttgg tggcccagtg taagcagagg |
| | gcaccaccac ctgctccctc |
| 4021 | gcccaggcta agaacctggg catccttctt tttcctcacc |
| | ccgtccaaca aactggtcac |
| 4081 | agtgttctgc caattctctc tccatgcaat cctatcatgc |
| | tatcctaact gcaattcaca |
| 4141 | aacccaaccc caactttcac tccaaacttg atccaagcaa |
| | tgtgctggat cccaactgta |
| 4201 | accttgcaaa ctcaactctg cccttcactt tgaccgtgac |
| | tatccttaat tgcagcagga |
| 4261 | aactgatcat tatgctcccc tcaatccaca cattgcctct |
| | gagtacagcc atggtttgtc |
| 4321 | cacgatttgc tcaaagacac tgcccatgtc ctgtgccagg |
| | gtctgtgaca atccctgacc |
| 4381 | tcctgggaca tggctcctta gagagaggag agcctttctc |
| | acagcttggg actttgagtc |
| 4441 | tgtgtctttt tttttttctt gagacggagt tttgctgtgg |
| | ttgcccaggc tggagtgcag |
| 4501 | tgatctcggc tcactgaaac ctccgcctcc cgggttcaaa |
| | cgattctcct gcctcagcct |
| 4561 | cccaagtagc tgggattaca ggcacccacc accatgccca |
| | gctaattttt ttgtattttt |
| 4621 | agtagagatg gggtttcacc atgttggcca ggctggtctc |
| | gaactcctga cctcaggtga |
| 4681 | tccacccgcc tttgcctccc aaagtgctgg gattacaggc |
| | gtcaaccacc gcgcccggcc |
| 4741 | gagtctgtgt cttgcctctg tgcctcagac ttgcggttcc |
| | ttgagatctc aggattggga |
| 4801 | cgtaagatgc cagcctgggg tcctcgtctc atagcccctt |
| | ccccctagta ctatggcact |
| 4861 | ggctgctgag gactggtggc tggaaggtct cagctgtgac |
| | tttggcttat ctgatcttct |
| 4921 | gcctgtgttc ccttgtgggc attcttcatc ttcaaagagg |
| | tgagtcatgt ccccagtggg |
| 4981 | tctgtccaaa ccctactcca tcttccccag gataagccgg |
| | ctctggccag tctgacaacc |
| 5041 | atctttcttt cctcccatcc ctcccttcaa gaccccagaa |
| | tcctgttctc cccagtcttc |
| 5101 | ctctagcctc cctcaaactt cccaagcctc ttgcaatttt |
| | tttttttttt ttgagacagg |
| 5161 | gtctcattct gtcaccccag ctggagtgca gtggcacaat |
| | ctgagctcac tgtaacctct |
| 5221 | gcctcccagg cttaagtgat tcttgtgctt cagcctcccg |
| | agtacctggg actacaagtg |
| 5281 | tatgccacca cacccggcca attttttata tttttagtag |
| | agacgaggtt tcaccatgtt |
| 5341 | ggccagactg gtctcgaact cttgacctca aatgatccgc |
| | ccacctcggc ctcccaaagt |
| 5401 | gctgggatta caggcacgag ccaccgcgcc cgtccgcctc |
| | gcaatttgaa ctcctgtctc |
| 5461 | ctttgttgaa ccaagtgacc tccccagcac ctggccccac |
| | aaatcctcac cctgccaagc |
| 5521 | agcccctcct ctgatcacgc cctttaactc ccaccagccc |
| | tggtcctgag gaggaaaaga |
| 5581 | aagcgaatga ctgaccccac caggaggtaa tgcaaccagt |
| | gcaccccgcg gtaacaccct |
| 5641 | ccaccttcac tttatgcctt gcacttactg tttcctctgc |
| | ccaggggttc tttgctccgt |
| 5701 | ctctactgtt tcaaatactg cccaacctca aagcccagct |
| | ccaaagctac ctcctctgtg |
| 5761 | aagaactcct tggaaatgat catctcagac tcctctattg |
| | gctgtcccag cacaagtgat |
| 5821 | cacgtttaac ttctgaaggc ctggacagaa tcttgagtgg |
| | gtccgccatt ccattccaag |
| 5881 | tcggccctca ccgtgcactt cctcttctcc cgccagattc |
| | ttcaaagtga cgcctccccc |
| 5941 | aggaagcggg ccccagaacc agtacgggaa cgtgctgtct |
| | ctccccacac ccacctcagg |
| 6001 | cctcggtaag aggcaccgcc cctccagcct atagctccgc |
| | cccagatccg gggctccacc |
| 6061 | cccactctcc tcatccctcc aatccgctgt gcgccaagcc |
| | ttctggagct cggaactccg |
| 6121 | cccccggggc ggggagtccc gcccagctat gagccccgcc |
| | tctagaacca gaccccgcct |
| 6181 | ccagggctca gagccacgcc cccaggaccc agagcctgaa |
| | gtcgtaatca agagcagaac |
| 6241 | ttcgccccag aactgaaggc ctcggcccta gatttagatt |
| | ccgccccagg gttcaaggcc |
| 6301 | gggttcctag acccagagtc cattcgcaga gcccaaaaca |
| | tcctcttccc gtgccccgcc |
| 6361 | gcgcggaccc ttagccttga ccgcccccat ctcttctgac |
| | cccgtcttac aatgcccctc |
| 6421 | tcaccaggac gcgcccagcg ttgggccgca ggcctggggg |
| | gcactgcccc gtcttatgga |
| 6481 | aacccgagca gcgacgtcca ggcggatgga gccttggggt |
| | cccggagccc gccgggagtg |
| 6541 | ggtgaatgac tgggagaggg aagggtcgtt ccccacatgg |
| | agggggttgg agcggtctgt |
| 6601 | ggcccgaata gtggactggg ccctggagga gagggggcat |
| | gactcggttc cccatcccca |
| 6661 | tccccaaacc cccaggccca gaagaagagg aaggggaggg |
| | ctatgaggaa cctgacagtg |
| 6721 | aggaggactc cgagttctat gagaacgact ccaaccttgg |
| | gcaggaccag ctctcccagg |
| 6781 | gtaaggctgc cctcccccgt ggccccccac ctctgcggtg |
| | gcctgtggac tcccatggac |
| 6841 | acccctcctt ctacaccaga tggcagcggc tacgagaacc |
| | ctgaggatga gcccctgggt |
| 6901 | cctgaggatg aagactcctt ctccaacggt aacttggggc |
| | ctttgtggga cctcagagac |
| 6961 | ttaggtgtaa ttgcagcgct gtgacactcc tagaagggga |
| | tccctggagt tctctctctt |
| 7021 | ctgccacagc tgagtcttat gagaacgagg atgaagagct |
| | gacccagccg gtcgccagga |
| 7081 | caatgggtgt gtgtgaggat ggcaacagtc caggggggag |
| | gcggaggaca cctggaggcc |
| 7141 | aggaggaata gtaacctccc tcttcccttt ccagacttcc |
| | tgagccctca tgggtcagcc |
| 7201 | tgggacccca gccgggaagc aacctccctg ggtgagagat |
| | gctttcaatc agactgcctt |
| 7261 | gcccagcttg ggtgacctgg cctcagctct gacaccagat |
| | ccaactttga cctgaccctg |
| 7321 | accccaaacc cgaacccaat cctgtgactc ctctcacctc |
| | aacactgagc cccatccccc |
| 7381 | atcctgagcc ccatccccca tcctgacccc caatatttac |
| | cccctcccta actgtgaata |
| 7441 | tcaacaccga tcccaatgca gtatcagcct ggacttgatc |
| | tccacctcac ctcagcccca |
| 7501 | gtgcagacct caacttggac cccagcttac tctgcagctt |
| | cttcatgact ctgactccga |
| 7561 | ctccctccag tttcttcttt ttctttttct tttttttgag |
| | acggagtctc cctctgttgc |
| 7621 | ccaggctgga gtgcagttgc cacctctgcc tcctaggttc |
| | aagcgattct catgcctcag |
| 7681 | cctcctgagt agctgggatt atagacgttt gccaccacac |
| | ctggctaatt tttgtatttt |
| 7741 | cagtagagac agggtttcgc catgttggcc agactggtct |
| | ccaactcctg gcctctagtg |
| 7801 | atctgcccgc ctttggcttc ccaaagtgct gggattacag |
| | gcatgagcca ccacgcccag |
| 7861 | cccagttctg ttcttgaccc cttccttagc cataatctaa |
| | cccatatcta accctgaccc |
| 7921 | tacagctaac tggggcccca aactcaatgc taaccaaatc |
| | accccttccc agcacagcat |
| 7981 | gggtaatgct cctcaccttc ctctgcccct cagtcttcct |
| | ccttaccgta ggctgtactt |
| 8041 | cccatgccct agcctccaat tctccatccc ccgcccaagc |
| | agggtcccag tcctatgagg |
| 8101 | atatgagagg aatcctgtat gcagcccccc agctccgctc |
| | cattcggggc cagcctggac |
| 8161 | ccaatcatga ggaaggtggg tgcttctgcc gctgtcccct |
| | gctgtcccct gggctgactt |
| 8221 | tgccttccag cctacttcca gtgccaccca tgttctcctc |
| | ctccctggtc ctatccagat |
| 8281 | gcagactctt atgagaacat ggataatccc gatgggccag |
| | acccagcctg gggaggaggg |
| 8341 | ggccgcatgg gcacctggag caccaggtga tcctcaggtg |
| | gccaggtgag ctgggactgc |
| 8401 | ccctagggaa agcggggagg gagggagata ggcacggatg |
| | gcagtggctg ctggctttca |
| 8461 | gggagggaga gggaacaggg ttcctagggc ctggtgggca |
| | gggggaggac tgctggaccc |
| 8521 | ctccccatca ccgtttcttc tgcatagcct ggatctcctc |
| | aagtccccaa gattcacacc |
| 8581 | tgactctgaa atctgaagac ctcgagcaga tgatgccaac |
| | ctctggagca atgttgctta |
| 8641 | ggatgtgtgc atgtgtgtaa gtgtgtgtgt gtgtgtgtgt |
| | gtgtatacat gccagtgaca |
| 8701 | cttccagtcc cctttgtatt ccttaaataa actcaatgag |
| | ctc |

[0360] An exemplary human CD72 amino acid sequence is set forth below (SEQ ID NO: 124; GenBank Accession No: NP_001773.1, Version 1, incorporated herein by reference):

| | |
|---|---|
| 1 | maeaityadl rfvkaplkks issrlgqdpg adddgeitye |
| | nvqvpavlgv psslassvlg |
| 61 | dkaavkseqp taswravtsp avgrilpcrt tclrylllgl |
| | lltclllgvt aiclgvrylq |
| 121 | vsqqlqqtnr vlevtnsslr qqlrlkitql gqsaedlqgs |
| | rrelaqsqea lqveqrahqa |
| 181 | aegqlqacqa drqktketlq seeqqrrale qklsnmenrl |
| | kpfftcgsad tccpsgwimh |
| 241 | qkscfyislt sknwqesqkq cetlssklat fseiypqshs |
| | yyflnsllpn ggsgnsywtg |
| 301 | lssnkdwklt ddtqrtrtya gsskcnkvhk twswwtlese |
| | scrsslpyic emtafrfpd |

[0361] An exemplary human CD72 nucleic acid sequence is set forth below (SEQ ID NO: 125; GenBank Accession No: NM_001782.2, Version 2, incorporated herein by reference):

| | |
|---|---|
| 1 | aattgctaag ccgtgcagtc acagagggaa cacagagcct |
| | agttgtaaac ggacagagac |
| 61 | gagaggggca agggaggaca gtggatgaca gggaagacga |
| | gtgggggcag agctgctcag |
| 121 | gaccatggct gaggccatca cctatgcaga tctgaggttt |
| | gtgaaggctc ccctgaagaa |
| 181 | gagcatctcc agccggttag gacaggaccc aggggctgat |
| | gatgatgggg aaatcaccta |
| 241 | cgagaatgtt caagtgcccg cagtcctagg ggtgccctca |
| | agcttggctt cttctgtact |
| 301 | aggggacaaa gcagcggtca agtcggagca gccaactgcg |
| | tcctggagag ccgtgacgtc |
| 361 | accagctgtc gggcggattc tcccctgccg cacaacctgc |
| | ctgcgatacc tcctgctcgg |
| 421 | cctgctcctc acctgcctgc tgttaggagt gaccgccatc |
| | tgcctgggag tgcgctatct |
| 481 | gcaggtgtct cagcagctcc agcagacgaa cagggttctg |
| | gaagtcacta acagcagcct |
| 541 | gaggcagcag ctccgcctca agataacgca gctgggacag |
| | agtgcagagg atctgcaggg |
| 601 | gtccaggaga gagctggcgc agagtcagga agcactacag |
| | gtggaacaga gggctcatca |
| 661 | ggcggccgaa gggcagctac aggcctgcca ggcagacaga |
| | cagaagacga aggagacctt |
| 721 | gcaaagtgag gagcaacaga ggagggcctt ggagcagaag |
| | ctgagcaaca tggagaacag |
| 781 | actgaagccc ttcttcacat gcggctcagc agacacctgc |
| | tgtccgtcgg gatggataat |
| 841 | gcatcagaaa agctgctttt acatctcact tacttcaaaa |
| | aattggcagg agagccaaaa |
| 901 | acaatgtgaa actctgtctt ccaagctggc cacattcagt |
| | gaaatttatc cacaatcaca |
| 961 | ctcttactac ttcttaaatt cactgttgcc aaatggtggt |
| | tcagggaatt catattggac |
| 1021 | tggcctcagc tctaacaagg attggaagtt gactgatgat |
| | acacaacgca ctaggactta |
| 1081 | tgctcaaagc tcaaaatgta acaaggtaca taaaacttgg |
| | tcatggtgga cactggagtc |
| 1141 | agagtcatgt agaagttctc ttccctacat ctgtgagatg |
| | acagctttca ggtttccaga |
| 1201 | ttaggacagt cctttgcact gagttgacac tcatgccaac |
| | aagaacctgt gcccctcctt |
| 1261 | cctaacctga ggcctggggt tcctcagacc atctccttca |
| | ttctgggcag tgcccagcca |
| 1321 | ccggctgacc cacacctgac acttccagcc agtctgctgc |
| | ctgctccctc ttcctgaaac |
| 1381 | tggactgttc ctgggaaaag ggtgaagcca cctctagaag |
| | ggactttggc ctccccccaa |
| 1441 | gaacttccca tggtagaatg gggtggggga ggagggcgca |
| | cgggctgagc ggataggggc |
| 1501 | ggcccggagc cagccaggca gttttattga aatcttttta |
| | aataattg |

[0362] An exemplary human FCRL1/3 amino acid sequence is set forth below (SEQ ID NO: 126; GenBank Accession No: Q96LA6.1, Version 1, incorporated herein by reference):

| | |
|---|---|
| 1 | mlprllllic aplcepaelf liaspshpte gspvtltckm |
| | pflqssdaqf qfcffrdtra |
| 61 | lgpgwssspk lqiaamwked tgsywceaqt maskvlrsrr |
| | sqinvhrvpv advsletqpp |
| 121 | ggqvmegdrl vlicsvamgt gditflwykg avglnlqskt |
| | qrsltaeyei psvresdaeq |
| 181 | yycvaengyg pspsglvsit vripvsrpil mlrapraqaa |
| | vedvlelhce alrgsppily |
| 241 | wfyheditlg srsapsggga sfnlslteeh sgnysceann |
| | glgaqrseav tlnftvptga |
| 301 | rsnhltsgvi egllstlgpa tvallfcygl krkigrrsar |
| | dplrslpspl pqeftylnsp |
| 361 | tpgqlqpiye nvnvvsgdev yslayynqpe qesvaaetlg |
| | thmedkvsld iysrlrkani |
| 421 | tdvdyedam |

[0363] An exemplary human FCRL1/3 nucleic acid sequence is set forth below (SEQ ID NO: 127; GenBank Accession No: NM_052938.4, Version 4, incorporated herein by reference):

| | |
|---|---|
| 1 | aacttccgat atcaacttcc tcaaacctct gatgagctgc |
| | tgctgctcga ctctgaggtg |
| 61 | cattcttttt ttgatgagag gcatctctag gtaccatccc |
| | tgacctggtc ctcatgctgc |
| 121 | cgaggctgtt gctgttgatc tgtgctccac tctgtgaacc |
| | tgccgagctg tttttgatag |
| 181 | ccagcccctc ccatcccaca gaggggagcc cagtgaccct |
| | gacgtgtaag atgccctttc |
| 241 | tacagagttc agatgcccag ttccagttct gctttttcag |
| | agacacccgg gccttgggcc |
| 301 | caggctggag cagctccccc aagctccaga tcgctgccat |
| | gtggaaagaa gacacagggt |
| 361 | catactggtg cgaggcacag acaatggcgt ccaaagtctt |
| | gaggagcagg agatcccaga |
| 421 | taaatgtgca cagggtccct gtcgctgatg tgagcttgga |
| | gactcagccc ccaggaggac |
| 481 | aggtgatgga gggagacagg ctggtcctca tctgctcagt |
| | tgctatgggc acaggagaca |
| 541 | tcaccttcct ttggtacaaa ggggctgtag gtttaaacct |
| | tcagtcaaag acccagcgtt |
| 601 | cactgacagc agagtatgag attccttcag tgagggagag |
| | tgatgctgag caatattact |
| 661 | gtgtagctga aaatggctat ggtcccagcc ccagtgggct |
| | ggtgagcatc actgtcagaa |
| 721 | tcccggtgtc tcgcccaatc ctcatgctca gggctcccag |
| | ggcccaggct gcagtggagg |
| 781 | atgtgctgga gcttcactgt gaggccctga gaggctctcc |
| | tccgatcctg tactggtttt |
| 841 | atcacgagga tatcaccctg gggagcaggt cggccccctc |
| | tggaggagga gcctccttca |
| 901 | acctttccct gactgaagaa cattctggaa actactcctg |
| | tgaggccaac aatggcctgg |
| 961 | gggcccagcg cagtgaggcg gtgacactca acttcacagt |
| | gcctactggg gccagaagca |
| 1021 | atcatcttac ctcaggagtc attgaggggc tgctcagcac |
| | ccttggtcca gccaccgtgg |
| 1081 | ccttattatt ttgctacggc ctcaaaagaa aaataggaag |
| | acgttcagcc agggatccac |
| 1141 | tcaggagcct tcccagccct ctaccccaag agttcaccta |
| | cctcaactca cctaccccag |
| 1201 | ggcagctaca gcctatatat gaaaatgtga atgttgtaag |
| | tggggatgag gtttattcac |
| 1261 | tggcgtacta taaccagccg gagcaggaat cagtagcagc |
| | agaaaccctg gggacacata |
| 1321 | tggaggacaa ggtttcctta gacatctatt ccaggctgag |
| | gaaagcaaac attacagatg |
| 1381 | tggactatga agatgctatg taaggttatg gaagattctg |
| | ctctttgaaa accatccatg |
| 1441 | accccaagcc tcaggcctga tatgttcttc agagatcctg |
| | gggcattagc tttccagtat |
| 1501 | acctcttctg gatgccattc tccatggcac tattccttca |
| | tctactgtga agtgaagttg |
| 1561 | gcgcagccct gaagaaacta cctaggagaa ctaatagaca |
| | caggagtgac agggactttg |
| 1621 | ttatcagaac cagattcctg ccggctcctt tgaaaacagg |
| | tcatattgtg ctcttctgtt |
| 1681 | tacaagagga aacaagatgg aataaaagaa attgggatct |
| | tgggttggag ggacagtgaa |
| 1741 | gcttagagca catgaactca aggttagtga ctctgcagga |
| | cttcacagag agagctgtgc |
| 1801 | ccatcattca gtccaagtgc tttctctgcc cagacagcac |
| | agaactccag ccccgctact |
| 1861 | tacatggatc atcgagtttc cacctaaaat atgattctat |
| | ttattttgag tcactgttac |
| 1921 | caaattagaa ctaaaacaaa gttacataaa aagttattgt |
| | gactccactt aattttagtg |
| 1981 | acgtattttt gtatatatag gccaacctat accacatcca |
| | aaattatgta tctattacag |
| 2041 | cccctagaag ctttataaat acagtgtgtc ttcttttatt |
| | cacaaaattt ttgaaatcgt |
| 2101 | ggtaatatgg tttgaaacct gtatcttaat tatttttttt |
| | ttaaattgag acagggtctc |
| 2161 | actctgtcac tcaatctgga atgcagtggc acaatcttgc |
| | ctcactgcaa cgcctgcctc |
| 2221 | tcaggctcaa gcaaacctct cacctcagcc tgctgagtag |
| | ctgggactac aggcacatgc |
| 2281 | caccaaactt ggccattttt tgtcttacgt agagacaaga |
| | tttcaccgtt ttgcccaggc |
| 2341 | tggtctcaaa ctcctgggct caagcaatgt attgaatttt |
| | aaaataacca ggcactcact |
| 2401 | cttatgaatt aataaacatt tggaggtata taaagtaaaa |
| | agttaaagtc tttcctgtaa |
| 2461 | gttaacacaa atgttaacta ttgttaaaaa ctttacaggt |
| | agctctctag atatttttct |
| 2521 | atttttgtat gtatacttat gcatacatgt aagtatataa |
| | acatttagaa gtgtacctat |
| 2581 | ctaacaaact attatgaaat actttcaaat ctgtaaatag |
| | atctattata ctattttaaa |
| 2641 | agtctctata gtagtgtgtt atatagataa atcataactt |
| | ttttcttttt ttattgtagt |
| 2701 | aaatatgcac aacataaaat tgatcatttt aaccattttt |
| | aagtgtacaa ttcagtggca |
| 2761 | ttaagtacta tcataatata ttttaatcct tctcatcact |
| | ggtggacatt aaggagactc |
| 2821 | tcaaaaaatt catattataa aaacaaagtt caaacaaatg |
| | tctttgtact agcatattat |
| 2881 | ggcactcctg ctggattatc tgaaggataa atttgtaaat |
| | ctagtattgc tagattatgc |
| 2941 | atattaaata ttcttgttaa atagtcttca atgtctctca |
| | ggtaaggctg tatcaattta |
| 3001 | tatcttcacc aacaacgtct gggaaatcag tttgtggggt |
| | gtattactta gttttcacat |
| 3061 | tgctaataaa gacatatcca agactgggta atttataaaa |
| | aaaaaaaaaa aaaaaa |

[0364] An exemplary human MS4A1 amino acid sequence is set forth below (SEQ ID NO: 128; GenBank Accession No: P11836.1, Version 1, incorporated herein by reference):

| | |
|---|---|
| 1 | mttprnsvng tfpaepmkgp iamqsgpkpl frrmsslvgp |
| | tqsffmresk tlgavqimng |
| 61 | lfhialggll mipagiyapi cvtvwyplwg gimyiisgsl |
| | laateknsrk clvkgkmimn |
| 121 | slslfaaisg milsimdiln ikishflkme slnfirahtp |
| | yiniyncepa npseknspst |
| 181 | qycysiqslf lgilsvmlif affqelviag ivenewkrtc |
| | srpksnivll saeekkeqti |
| 241 | eikeevvglt etssqpknee dieiipiqee eeeetetnfp |
| | eppqdqessp iendssp |

[0365] An exemplary human MS4A1 nucleic acid sequence is set forth below (SEQ ID NO: 129; GenBank Accession No: NM_152866.2, Version 2, incorporated herein by reference):

| | |
|---|---|
| 1 | gtctatcagc gatttcatct tcaggcctgg actacaccac |
| | tcaccctccc agtgtgcttg |
| 61 | agaaacaaac tgcacccact gaactccgca gctagcatcc |
| | aaatcagccc ttgagatttg |
| 121 | aggccttgga gactcagatc ctgaacaaga gagaacaaaa |
| | tctctacttt gatggaactt |
| 181 | ccattctgtg gggaagagac tgacaataag caattaaata |
| | aataagaact cagcagtagg |
| 241 | ccttgcctca gatccaaggt cactcggaag aggccatgtc |
| | taccctcaat gacactcatg |
| 301 | gaggaaatgc tgagagaagc attcagatgc atgacacaag |
| | gtaagactgc caaaaatctt |
| 361 | gttcttgctc tcctcatttt gttatttgtt ttatttttag |
| | gagttttgag agcaaaatga |
| 421 | caacacccag aaattcagta aatgggactt tcccggcaga |
| | gccaatgaaa ggccctattg |
| 481 | ctatgcaatc tggtccaaaa ccactcttca ggaggatgtc |
| | ttcactggtg ggccccacgc |
| 541 | aaagcttctt catgagggaa tctaagactt tgggggctgt |
| | ccagattatg aatgggctct |
| 601 | tccacattgc cctggggggt cttctgatga tcccagcagg |
| | gatctatgca cccatctgtg |
| 661 | tgactgtgtg gtaccctctc tggggaggca ttatgtatat |
| | tatttccgga tcactcctgg |
| 721 | cagcaacgga gaaaaactcc aggaagtgtt tggtcaaagg |
| | aaaaatgata atgaattcat |
| 781 | tgagcctctt tgctgccatt tctggaatga ttctttcaat |
| | catggacata cttaatatta |
| 841 | aaatttccca ttttttaaaa atggagagtc tgaattttat |
| | tagagctcac acaccatata |
| 901 | ttaacatata caactgtgaa ccagctaatc cctctgagaa |
| | aaactcccca tctacccaat |
| 961 | actgttacag catacaatct ctgttcttgg gcattttgtc |
| | agtgatgctg atctttgcct |
| 1021 | tcttccagga acttgtaata gctggcatcg ttgagaatga |
| | atggaaaaga acgtgctcca |
| 1081 | gacccaaatc taacatagtt ctcctgtcag cagaagaaaa |
| | aaaagaacag actattgaaa |
| 1141 | taaaagaaga agtggttggg ctaactgaaa catcttccca |
| | accaaagaat gaagaagaca |
| 1201 | ttgaaattat tccaatccaa gaagaggaag aagaagaaac |
| | agagacgaac tttccagaac |
| 1261 | ctccccaaga tcaggaatcc tcaccaatag aaaatgacag |
| | ctctccttaa gtgatttctt |
| 1321 | ctgttttctg tttccttttt taaacattag tgttcatagc |
| | ttccaagaga catgctgact |
| 1381 | ttcatttctt gaggtactct gcacatacgc accacatctc |
| | tatctggcct ttgcatggag |
| 1441 | tgaccatagc tccttctctc ttacattgaa tgtagagaat |
| | gtagccattg tagcagcttg |
| 1501 | tgttgtcacg cttcttcttt tgagcaactt tcttacactg |
| | aagaaaggca gaatgagtgc |
| 1561 | ttcagaatgt gatttcctac taacctgttc cttggatagg |
| | ctttttagta tagtattttt |
| 1621 | ttttgtcatt ttctccatca acaaccaggg agactgcacc |
| | tgatggaaaa gatatatgac |
| 1681 | tgcttcatga cattcctaaa ctatcttttt tttattccac |
| | atctacgttt ttggtggagt |
| 1741 | cccttttgca tcattgtttt aaggatgata aaaaaaaata |
| | acaactaggg acaatacaga |
| 1801 | acccattcca tttatctttc tacagggctg acattgtggc |
| | acattcttag agttaccaca |
| 1861 | ccccatgagg gaagctctaa atagccaaca cccatctgtt |
| | ttttgtaaaa acagcatagc |
| 1921 | ttatacatgg acatgtctct gccttaactt ttcctaactc |
| | ccactctagg ctattgtttg |
| 1981 | catgtctacc tacttttagc cattatgcga gaaaagaaaa |
| | aaatgaccat agaaaatgcc |
| 2041 | accatgaggt gcccaaattt caaataataa ttaacattta |
| | gttatattta taatttccag |
| 2101 | atgacaaagt atttcatcaa ataacttcat ttgatgttcc |
| | atgatcaaga aagaatccct |
| 2161 | atctctattt tacaagtaat tcaaagaggc caaataactt |
| | gtaaacaaga aaaggtaact |
| 2221 | tgtcaacagt cataactagt aattatgaga gccttgtttc |
| | ataaccaggt cttcttactc |
| 2281 | aaatcctgtg atgtttgaaa taaccaaatt gtctctccaa |
| | tgtctgcata aactgtgaga |
| 2341 | gccaagtcaa cagcttttat caagaattta ctctctgacc |
| | agcaataaac aagcactgag |
| 2401 | agacacagag agccagattc agattttacc catggggata |
| | aaaagactca gactttcacc |
| 2461 | acatttggaa aactacttgc atcataaata tataataact |
| | ggtagtttat atgaagcaga |
| 2521 | cactaagtgc tatagacact ctcagaatat catacttgga |
| | aacaatgtaa ttaaaatgcc |
| 2581 | gaatctgagt caacagctgc cctacttttc aattcagata |
| | tactagtacc ttacctagaa |
| 2641 | ataatgttaa cctagggtga agtcactata atctgtagtc |
| | tattatttgg gcatttgcta |
| 2701 | catgatgagt gctgccagat tgtggcaggt aaagagacaa |
| | tgtaatttgc actccctatg |
| 2761 | atatttctac atttttagcg accactagtg gaagacattc |
| | cccaaaatta gaaaaaaagg |
| 2821 | agatagaaga tttctgtcta tgtaaagttc tcaaaatttg |
| | ttctaaatta ataaaactat |
| 2881 | ctttgtgttc ttttctgcaa cagatgattc caacatgggt |
| | gtttgtctat tcttctttac |
| 2941 | tcttgaaaca ttagaccatg ggaggctctt acagccttga |
| | gttgatattt atacaaccca |
| 3001 | aatctaggtt tgaacggtga ggtgtcaggt catcaaatat |
| | tcatgtctat atagtcttac |
| 3061 | acaggttctc aaaaaaaatg ttcatgggat aggtcattga |
| | taatggattc cttattctga |
| 3121 | gaactccaga cgactgaaat atatgagaga aggaaaagga |
| | catagtagga gcaggcctga |
| 3181 | gaaaaaaatg aaagtcagaa atctttaaaa aaatacaaga |
| | tcttatttct atcttatttt |
| 3241 | ttctcctctt ctgaaatata tatgaggatt cctctccaaa |
| | cccatggttt ctctaagaat |
| 3301 | tttgagtcat ttgtatgacc tcaaataatt agttttagct |
| | gacctcacat aactccttat |
| 3361 | aataggagac atctttaatg tctgctatta aagaaggatg |
| | aaaattccta tgaccttctc |
| 3421 | cccgattatc cctttggcaa tatagagtca aataataaca |
| | ttgaccaata gtaaacatgc |
| 3481 | tttgccaaga agtagaagat atattctcta gccttagttt |
| | ttcctcccaa tttgcatttt |
| 3541 | tgtaaaaata atgttgtatc cacaaaggaa ataaacttta |
| | aaaacccaag tgca |

[0366] An exemplary human CTLA4 amino acid sequence is set forth below (SEQ ID NO: 130; GenBank Accession No: AAL07473.1, Version 1, incorporated herein by reference):

| | |
|---|---|
| 1 | maclgfqrhk aqlnlatrtw pctllffllf ipvfckamhv |
| | aqpavvlass rgiasfvcey |
| 61 | aspgkatevr vtvlrqadsq vtevcaatym mgneltfldd |
| | sictgtssgn qvnltiqglr |
| 121 | amdtglyick velmypppyy lgigngtqiy vidpepcpds |
| | dfllwilaav ssglffysfl |
| 181 | ltavslskml kkrsplttgv yvkmpptepe cekqfqpyfi |
| | pin |

[0367] An exemplary human CTLA4 nucleic acid sequence is set forth below (SEQ ID NO: 131; GenBank Accession No: AF414120.1, Version 1, incorporated herein by reference):

| | |
|---|---|
| 1 | cttctgtgtg tgcacatgtg taatacatat ctgggatcaa |
| | agctatctat ataaagtcct |
| 61 | tgattctgtg tgggttcaaa cacatttcaa agcttcagga |
| | tcctgaaagg ttttgctcta |
| 121 | cttcctgaag acctgaacac cgctcccata aagccatggc |
| | ttgccttgga tttcagcggc |
| 181 | acaaggctca gctgaacctg gctaccagga cctggccctg |
| | cactctcctg ttttttcttc |
| 241 | tcttcatccc tgtcttctgc aaagcaatgc acgtggccca |
| | gcctgctgtg gtactggcca |
| 301 | gcagccgagg catcgccagc tttgtgtgtg agtatgcatc |
| | tccaggcaaa gccactgagg |
| 361 | tccgggtgac agtgcttcgg caggctgaca gccaggtgac |
| | tgaagtctgt gcggcaacct |
| 421 | acatgatggg gaatgagttg accttcctag atgattccat |
| | ctgcacgggc acctccagtg |
| 481 | gaaatcaagt gaacctcact atccaaggac tgagggccat |
| | ggacacggga ctctacatct |
| 541 | gcaaggtgga gctcatgtac ccaccgccat actacctggg |
| | cataggcaac ggaacccaga |
| 601 | tttatgtaat tgatccagaa ccgtgcccag attctgactt |
| | cctcctctgg atccttgcag |
| 661 | cagttagttc ggggttgttt ttttatagct ttctcctcac |
| | agctgtttct ttgagcaaaa |
| 721 | tgctaaagaa aagaagccct cttacaacag gggtctatgt |
| | gaaaatgccc ccaacagagc |
| 781 | cagaatgtga aaagcaattt cagccttatt ttattcccat |
| | caattgagaa accattatga |
| 841 | agaagagagt ccatatttca atttccaaga gctgaggcaa |
| | ttctaacttt tttgctatcc |
| 901 | agctattttt atttgtttgt gcatttgggg ggaattcatc |
| | tctctttaat ataaagttgg |
| 961 | atgcggaacc caaattacgt gtactacaat ttaaagcaaa |
| | ggagtagaaa gacagagctg |
| 1021 | ggatgtttct gtcacatcag ctccactttc agtgaaagca |
| | tcacttggga ttaatatggg |
| 1081 | gatgcagcat tatgatgtgg gtcaaggaat taagttaggg |
| | aatggcacag cccaaagaag |
| 1141 | gaaaaggcag ggagcgaggg agaagactat attgtacaca |
| | ccttatattt acgtatgaga |
| 1201 | cgtttatagc cgaaatgatc ttttcaagtt aaattttatg |
| | ccttttattt cttaaacaaa |
| 1261 | tgtatgatta catcaaggct tcaaaaatac tcacatggct |
| | atgttttagc cagtgatgct |
| 1321 | aaaggttgta ttgcatatat acatatatat atatatatat |
| | atatatatat atatatatat |
| 1381 | atatatatat tttaatttga tagtattgtg catagagcca |
| | cgtatgtttt tgtgtatttg |
| 1441 | ttaatggttt gaatataaac actatatggc agtgtctttc |
| | caccttgggt cccagggaag |
| 1501 | ttttgtggag gagctcagga cactaataca ccaggtagaa |
| | cacaaggtca tttgctaact |
| 1561 | agcttggaaa ctggatgagg tcatagcagt gcttgattgc |
| | gtggaattgt gctgagttgg |
| 1621 | tgttgacatg tgctttgggg cttttacacc agttcctttc |
| | aatggtttgc aaggaagcca |
| 1681 | cagctggtgg tatctgagtt gacttgacag aacactgtct |
| | tgaagacaat ggcttactcc |
| 1741 | aggagaccca caggtatgac cttctaggaa gctccagttc |
| | gatgggccca attcttacaa |
| 1801 | acatgtggtt aatgccatgg acagaagaag gcagcaggtg |
| | gcagaatggg gtgcatgaag |
| 1861 | gtttctgaaa attaacactg cttgtgtttt taactcaata |
| | ttttccatga aaatgcaaca |
| 1921 | acatgtataa tatttttaat taaataaaaa tctgtggtgg |
| | tcgttttaaa aaaaaaaaaa |
| 1981 | aaaaaaaaaa aaaaaaaaaa aaaaaaaaaa aaaaaaaaaa |
| | aaaaa |

[0368] An exemplary human LAG3 amino acid sequence is set forth below (SEQ ID NO: 132; GenBank Accession No: AAH52589.1, Version 1, incorporated herein by reference):

| | |
|---|---|
| 1 | mweaqflgll flqplwvapv kplqpgaevp vvwaqegapa |
| | qlpcsptipl qdlsllrrag |
| 61 | vtwqhqpdsg ppaaapghpl apgphpaaps swgprprryt |
| | vlsvgpgglr sgrlplqprv |
| 121 | qldergrqrg dfslwlrpar radageyraa vhlrdralsc |
| | rlrlrlgqas mtasppgslr |
| 181 | asdwvilncs fsrpdrpasv hwfrnrgqgr vpvresphhh |
| | laesflflpq vspmdsgpwg |
| 241 | ciltyrdgfn vsimynltvl glepptpltv yagagsrvgl |
| | pcrlpagvgt rsfltakwtp |
| 301 | pgggpdllvt gdngdftlrl edvsqaqagt ytchihlqeq |
| | qlnatvtlai itgqpqvgke |

[0369] An exemplary human LAG3 nucleic acid sequence is set forth below (SEQ ID NO: 133; GenBank Accession No: NM_002286.5, Version 5, incorporated herein by reference):

| | |
|---|---|
| 1 | acaggggtga aggcccagag accagcagaa cggcatccca |
| | gccacgacgg ccactttgct |
| 61 | ctgtctgctc tccgccacgg ccctgctctg ttccctggga |
| | cacccccgcc cccacctcct |
| 121 | caggctgcct gatctgccca gctttccagc tttcctctgg |
| | attccggcct ctggtcatcc |
| 181 | ctccccaccc tctctccaag gccctctcct ggtctccctt |
| | cttctagaac cccttcctcc |
| 241 | acctccctct ctgcagaact tctcctttac cccccacccc |
| | ccaccactgc cccctttcct |
| 301 | tttctgacct ccttttggag ggctcagcgc tgcccagacc |
| | ataggagaga tgtgggaggc |
| 361 | tcagttcctg ggcttgctgt ttctgcagcc gctttgggtg |
| | gctccagtga agcctctcca |
| 421 | gccaggggct gaggtcccgg tggtgtgggc ccaggagggg |
| | gctcctgccc agctcccctg |
| 481 | cagccccaca atccccctcc aggatctcag ccttctgcga |
| | agagcagggg tcacttggca |
| 541 | gcatcagcca gacagtggcc cgcccgctgc cgcccccggc |
| | catcccctgg cccccggccc |
| 601 | tcacccggcg gcgccctcct cctgggggcc caggccccgc |
| | cgctacacgg tgctgagcgt |
| 661 | gggtcccgga ggcctgcgca gcgggaggct gcccctgcag |
| | ccccgcgtcc agctggatga |
| 721 | gcgcggccgg cagcgcgggg acttctcgct atggctgcgc |
| | ccagcccggc gcgcggacgc |
| 781 | cggcgagtac cgcgccgcgg tgcacctcag ggaccgcgcc |
| | ctctcctgcc gcctccgtct |
| 841 | gcgcctgggc caggcctcga tgactgccag ccccccagga |
| | tctctcagag cctccgactg |
| 901 | ggtcattttg aactgctcct tcagccgccc tgaccgccca |
| | gcctctgtgc attggttccg |
| 961 | gaaccggggc cagggccgag tccctgtccg ggagtccccc |
| | catcaccact tagcggaaag |
| 1021 | cttcctcttc ctgccccaag tcagccccat ggactctggg |
| | ccctggggct gcatcctcac |
| 1081 | ctacagagat ggcttcaacg tctccatcat gtataacctc |
| | actgttctgg gtctggagcc |
| 1141 | cccaactccc ttgacagtgt acgctggagc aggttccagg |
| | gtggggctgc cctgccgcct |
| 1201 | gcctgctggt gtggggaccc ggtctttcct cactgccaag |
| | tggactcctc ctgggggagg |
| 1261 | ccctgacctc ctggtgactg gagacaatgg cgactttacc |
| | cttcgactag aggatgtgag |
| 1321 | ccaggcccag gctgggacct acacctgcca tatccatctg |
| | caggaacagc agctcaatgc |
| 1381 | cactgtcaca ttggcaatca tcacagtgac tcccaaatcc |
| | tttgggtcac ctggatccct |
| 1441 | ggggaagctg ctttgtgagg tgactccagt atctggacaa |
| | gaacgctttg tgtggagctc |
| 1501 | tctggacacc ccatcccaga ggagtttctc aggaccttgg |
| | ctggaggcac aggaggccca |
| 1561 | gctcctttcc cagccttggc aatgccagct gtaccagggg |
| | gagaggcttc ttggagcagc |
| 1621 | agtgtacttc acagagctgt ctagcccagg tgcccaacgc |
| | tctgggagag ccccaggtgc |
| 1681 | cctcccagca ggccacctcc tgctgtttct catccttggt |
| | gtcctttctc tgctcctttt |
| 1741 | ggtgactgga gcctttggct ttcacctttg gagaagacag |
| | tggcgaccaa gacgattttc |
| 1801 | tgccttagag caagggattc accctccgca ggctcagagc |
| | aagatagagg agctggagca |
| 1861 | agaaccggag ccggagccgg agccggaacc ggagcccgag |
| | cccgagcccg agccggagca |
| 1921 | gctctgacct ggagctgagg cagccagcag atctcagcag |
| | cccagtccaa ataaactccc |
| 1981 | tgtcagcagc aaaaa |

[0370] An exemplary human FCRL1 amino acid sequence is set forth below (SEQ ID NO: 134; GenBank Accession No: Q96LA6.1, Version 1, incorporated herein by reference):

| | |
|---|---|
| 1 | mlprllllic aplcepaelf liaspshpte gspvtltckm |
| | pflqssdaqf qfcffrdtra |
| 61 | lgpgwssspk lqiaamwked tgsywceaqt maskvlrsrr |
| | sqinvhrvpv advsletqpp |
| 121 | ggqvmegdrl vlicsvamgt gditflwykg avglnlqskt |
| | qrsltaeyei psvresdaeq |
| 181 | yycvaengyg pspsglvsit vripvsrpil mlrapraqaa |
| | vedvlelhce alrgsppily |
| 241 | wfyheditlg srsapsggga sfnlslteeh sgnysceann |
| | glgaqrseav tlnftvptga |
| 301 | rsnhltsgvi egllstlgpa tvallfcygl krkigrrsar |
| | dplrslpspl pqeftylnsp |
| 361 | tpgqlqpiye nvnvvsgdev yslayynqpe qesvaaetlg |
| | thmedkvsld iysrlrkani |
| 421 | tdvdyedam |

[0371] An exemplary human FCRL1 nucleic acid sequence is set forth below (SEQ ID NO: 135; GenBank Accession No: NM_052938.4, Version 4, incorporated herein by reference):

| | |
|---|---|
| 1 | aacttccgat atcaacttcc tcaaacctct gatgagctgc |
| | tgctgctcga ctctgaggtg |
| 61 | cattcttttt ttgatgagag gcatctctag gtaccatccc |
| | tgacctggtc ctcatgctgc |
| 121 | cgaggctgtt gctgttgatc tgtgctccac tctgtgaacc |
| | tgccgagctg tttttgatag |
| 181 | ccagcccctc ccatcccaca gaggggagcc cagtgaccct |
| | gacgtgtaag atgccctttc |
| 241 | tacagagttc agatgcccag ttccagttct gctttttcag |
| | agacacccgg gccttgggcc |
| 301 | caggctggag cagctccccc aagctccaga tcgctgccat |
| | gtggaaagaa gacacagggt |
| 361 | catactggtg cgaggcacag acaatggcgt ccaaagtctt |
| | gaggagcagg agatcccaga |
| 421 | taaatgtgca cagggtccct gtcgctgatg tgagcttgga |
| | gactcagccc ccaggaggac |
| 481 | aggtgatgga gggagacagg ctggtcctca tctgctcagt |
| | tgctatgggc acaggagaca |
| 541 | tcaccttcct ttggtacaaa ggggctgtag gtttaaacct |
| | tcagtcaaag acccagcgtt |
| 601 | cactgacagc agagtatgag attccttcag tgagggagag |
| | tgatgctgag caatattact |
| 661 | gtgtagctga aaatggctat ggtcccagcc ccagtgggct |
| | ggtgagcatc actgtcagaa |
| 721 | tcccggtgtc tcgcccaatc ctcatgctca gggctcccag |
| | ggcccaggct gcagtggagg |
| 781 | atgtgctgga gcttcactgt gaggccctga gaggctctcc |
| | tccgatcctg tactggtttt |
| 841 | atcacgagga tatcaccctg gggagcaggt cggccccctc |
| | tggaggagga gcctccttca |
| 901 | acctttccct gactgaagaa cattctggaa actactcctg |
| | tgaggccaac aatggcctgg |
| 961 | gggcccagcg cagtgaggcg gtgacactca acttcacagt |
| | gcctactggg gccagaagca |
| 1021 | atcatcttac ctcaggagtc attgaggggc tgctcagcac |
| | ccttggtcca gccaccgtgg |
| 1081 | ccttattatt ttgctacggc ctcaaaagaa aaataggaag |
| | acgttcagcc agggatccac |
| 1141 | tcaggagcct tcccagccct ctaccccaag agttcaccta |
| | cctcaactca cctaccccag |
| 1201 | ggcagctaca gcctatatat gaaaatgtga atgttgtaag |
| | tggggatgag gtttattcac |
| 1261 | tggcgtacta taaccagccg gagcaggaat cagtagcagc |
| | agaaaccctg gggacacata |
| 1321 | tggaggacaa ggtttcctta gacatctatt ccaggctgag |
| | gaaagcaaac attacagatg |
| 1381 | tggactatga agatgctatg taaggttatg gaagattctg |
| | ctctttgaaa accatccatg |
| 1441 | accccaagcc tcaggcctga tatgttcttc agagatcctg |
| | gggcattagc tttccagtat |
| 1501 | acctcttctg gatgccattc tccatggcac tattccttca |
| | tctactgtga agtgaagttg |
| 1561 | gcgcagccct gaagaaacta cctaggagaa ctaatagaca |
| | caggagtgac agggactttg |
| 1621 | ttatcagaac cagattcctg ccggctcctt tgaaaacagg |
| | tcatattgtg ctcttctgtt |
| 1681 | tacaagagga aacaagatgg aataaaagaa attgggatct |
| | tgggttggag ggacagtgaa |
| 1741 | gcttagagca catgaactca aggttagtga ctctgcagga |
| | cttcacagag agagctgtgc |
| 1801 | ccatcattca gtccaagtgc tttctctgcc cagacagcac |
| | agaactccag ccccgctact |
| 1861 | tacatggatc atcgagtttc cacctaaaat atgattctat |
| | ttattttgag tcactgttac |
| 1921 | caaattagaa ctaaaacaaa gttacataaa aagttattgt |
| | gactccactt aattttagtg |
| 1981 | acgtattttt gtatatatag gccaacctat accacatcca |
| | aaattatgta tctattacag |
| 2041 | cccctagaag ctttataaat acagtgtgtc ttcttttatt |
| | cacaaaattt ttgaaatcgt |
| 2101 | ggtaatatgg tttgaaacct gtatcttaat tatttttttt |
| | ttaaattgag acagggtctc |
| 2161 | actctgtcac tcaatctgga atgcagtggc acaatcttgc |
| | ctcactgcaa cgcctgcctc |
| 2221 | tcaggctcaa gcaaacctct cacctcagcc tgctgagtag |
| | ctgggactac aggcacatgc |
| 2281 | caccaaactt ggccattttt tgtcttacgt agagacaaga |
| | tttcaccgtt ttgcccaggc |
| 2341 | tggtctcaaa ctcctgggct caagcaatgt attgaatttt |
| | aaaataacca ggcactcact |
| 2401 | cttatgaatt aataaacatt tggaggtata taaagtaaaa |
| | agttaaagtc tttcctgtaa |
| 2461 | gttaacacaa atgttaacta ttgttaaaaa ctttacaggt |
| | agctctctag atatttttct |
| 2521 | atttttgtat gtatacttat gcatacatgt aagtatataa |
| | acatttagaa gtgtacctat |
| 2581 | ctaacaaact attatgaaat actttcaaat ctgtaaatag |
| | atctattata ctattttaaa |
| 2641 | agtctctata gtagtgtgtt atatagataa atcataactt |
| | ttttcttttt ttattgtagt |
| 2701 | aaatatgcac aacataaaat tgatcatttt aaccattttt |
| | aagtgtacaa ttcagtggca |
| 2761 | ttaagtacta tcataatata ttttaatcct tctcatcact |
| | ggtggacatt aaggagactc |
| 2821 | tcaaaaaatt catattataa aaacaaagtt caaacaaatg |
| | tctttgtact agcatattat |
| 2881 | ggcactcctg ctggattatc tgaaggataa atttgtaaat |
| | ctagtattgc tagattatgc |
| 2941 | atattaaata ttcttgttaa atagtcttca atgtctctca |
| | ggtaaggctg tatcaattta |
| 3001 | tatcttcacc aacaacgtct gggaaatcag tttgtggggt |
| | gtattactta gttttcacat |
| 3061 | tgctaataaa gacatatcca agactgggta atttataaaa |
| | aaaaaaaaaa aaaaaa |

[0372] An exemplary human FCRL3 amino acid sequence is set forth below (SEQ ID NO: 136; GenBank Accession No: AAH28933.1, Version 1, incorporated herein by reference):

| | |
|---|---|
| 1 | mllwllllil tpgreqsgva pkavlllnpp wstafkgekv |
| | alicssishs laqgdtywyh |
| 61 | dekllkikhd kiqitepgny qcktrgssls davhvefspd |
| | wlilqalhpv fegdnvilrc |
| 121 | qgkdnknthq kvyykdgkql pnsynlekit vnsysrdnsk |
| | yhctayrkfy ildievtskp |
| 181 | lniqvqelfl hpvlrassst piegspmtlt cetqlspqrp |
| | dvqlqfslfr dsqtlglgws |
| 241 | rsprlqipam wtedsgsywc evetvthsik krslrsqirv |
| | qrvpvsnvnl eirptggqli |
| 301 | egenmvlics vaqgsgtvtf swhkegrvrs lgrktqrsll |
| | aelhvltvke sdagryycaa |
| 361 | dnvhspilst wirvtvripv shpvltfrap rahtvvgdll |
| | elhceslrgs ppilyrfyhe |
| 421 | dvtlgnssap sgggasfnls ltaehsgnys cdadnglgaq |
| | hshgvslrvt vpvsrpvltl |
| 481 | rapgaqavvg dllelhcesl rgsfpilywf yheddtlgni |
| | sahsgggasf nlslttehsg |
| 541 | nysceadngl gaqhskvvtl nvtgtsrnrt gltaagitgl |
| | vlsilvlaaa aallhyarar |
| 601 | rkpgglsatg tsshspsecq epsssrpsri dpqepthskp |
| | lapmelepmy snvnpgdsnp |
| 661 | iysqiwsiqh tkensancpm mhqeheeltv lyselkkthp |
| | ddsageassr graheeddee |
| 721 | nyenilnprk nkvqdfpcic nt |

[0373] An exemplary human FCRL3 nucleic acid sequence is set forth below (SEQ ID NO: 137; GenBank Accession No: NM_052939.3, Version 3, incorporated herein by reference):

| | |
|---|---|
| 1 | agtgaagggg tttcccatat gaaaaataca gaaagaatta |
| | tttgaatact agcaaataca |
| 61 | caacttgata tttctagaga acccaggcac agtcttggag |
| | acattactcc tgagagactg |
| 121 | cagctgatgg aagatgagcc ccaacttcta aaaatgtatc |
| | actaccggga ttgagataca |
| 181 | aacagcattt aggaaggtct catctgagta gcagcttcct |
| | gccctccttc ttggagataa |
| 241 | gtcgggcttt tggtgagaca gactttccca accctctgcc |
| | cggccggtgc ccatgcttct |
| 301 | gtggctgctg ctgctgatcc tgactcctgg aagagaacaa |
| | tcaggggtgg ccccaaaagc |
| 361 | tgtacttctc ctcaatcctc catggtccac agccttcaaa |
| | ggagaaaaag tggctctcat |
| 421 | atgcagcagc atatcacatt ccctagccca gggagacaca |
| | tattggtatc acgatgagaa |
| 481 | gttgttgaaa ataaaacatg acaagatcca aattacagag |
| | cctggaaatt accaatgtaa |
| 541 | gacccgagga tcctccctca gtgatgccgt gcatgtggaa |
| | ttttcacctg actggctgat |
| 601 | cctgcaggct ttacatcctg tctttgaagg agacaatgtc |
| | attctgagat gtcaggggaa |
| 661 | agacaacaaa aacactcatc aaaaggttta ctacaaggat |
| | ggaaaacagc ttcctaatag |
| 721 | ttataattta gagaagatca cagtgaattc agtctccagg |
| | gataatagca aatatcattg |
| 781 | tactgcttat aggaagtttt acatacttga cattgaagta |
| | acttcaaaac ccctaaatat |
| 841 | ccaagttcaa gagctgtttc tacatcctgt gctgagagcc |
| | agctcttcca cgcccataga |
| 901 | ggggagtccc atgaccctga cctgtgagac ccagctctct |
| | ccacagaggc cagatgtcca |
| 961 | gctgcaattc tccctcttca gagatagcca gaccctcgga |
| | ttgggctgga gcaggtcccc |
| 1021 | cagactccag atccctgcca tgtggactga agactcaggg |
| | tcttactggt gtgaggtgga |
| 1081 | gacagtgact cacagcatca aaaaaaggag cctgagatct |
| | cagatacgtg tacagagagt |
| 1141 | ccctgtgtct aatgtgaatc tagagatccg gcccaccgga |
| | gggcagctga ttgaaggaga |
| 1201 | aaatatggtc cttatttgct cagtagccca gggttcaggg |
| | actgtcacat tctcctggca |
| 1261 | caaagaagga agagtaagaa gcctgggtag aaagacccag |
| | cgttccctgt tggcagagct |
| 1321 | gcatgttctc accgtgaagg agagtgatgc agggagatac |
| | tactgtgcag ctgataacgt |
| 1381 | tcacagcccc atcctcagca cgtggattcg agtcaccgtg |
| | agaattccgg tatctcaccc |
| 1441 | tgtcctcacc ttcagggctc ccagggccca cactgtggtg |
| | ggggacctgc tggagcttca |
| 1501 | ctgtgagtcc ctgagaggct ctcccccgat cctgtaccga |
| | ttttatcatg aggatgtcac |
| 1561 | cctggggaac agctcagccc cctctggagg aggagcctcc |
| | ttcaacctct ctctgactgc |
| 1621 | agaacattct ggaaactact cctgtgatgc agacaatggc |
| | ctgggggccc agcacagtca |
| 1681 | tggagtgagt ctcagggtca cagttccggt gtctcgcccc |
| | gtcctcaccc tcagggctcc |
| 1741 | cggggcccag gctgtggtgg gggacctgct ggagcttcac |
| | tgtgagtccc tgagaggctc |
| 1801 | cttcccgatc ctgtactggt tttatcacga ggatgacacc |
| | ttggggaaca tctcggccca |
| 1861 | ctctggagga ggggcatcct tcaacctctc tctgactaca |
| | gaacattctg gaaactactc |
| 1921 | atgtgaggct gacaatggcc tgggggccca gcacagtaaa |
| | gtggtgacac tcaatgttac |
| 1981 | aggaacttcc aggaacagaa caggccttac cgctgcggga |
| | atcacggggc tggtgctcag |
| 2041 | catcctcgtc cttgctgctg ctgctgctct gctgcattac |
| | gccagggccc gaaggaaacc |
| 2101 | aggaggactt tctgccactg gaacatctag tcacagtcct |
| | agtgagtgtc aggagccttc |
| 2161 | ctcgtccagg ccttccagga tagaccctca agagcccact |
| | cactctaaac cactagcccc |
| 2221 | aatggagctg gagccaatgt acagcaatgt aaatcctgga |
| | gatagcaacc cgatttattc |
| 2281 | ccagatctgg agcatccagc atacaaaaga aaactcagct |
| | aattgtccaa tgatgcatca |
| 2341 | agagcatgag gaacttacag tcctctattc agaactgaag |
| | aagacacacc cagacgactc |
| 2401 | tgcaggggag gctagcagca gaggcagggc ccatgaagaa |
| | gatgatgaag aaaactatga |
| 2461 | gaatgtacca cgtgtattac tggcctcaga ccactagccc |
| | cttacccaga gtggcccaca |
| 2521 | ggaaacagcc tgcaccattt ttttttctgt tctctccaac |
| | cacacatcat ccatctctcc |
| 2581 | agactctgcc tcctacgagg ctgggctgca gggtatgtga |
| | ggctgagcaa aaggtctgca |
| 2641 | aatctcccct gtgcctgatc tgtgtgttcc ccaggaagag |
| | agcaggcagc ctctgagcaa |
| 2701 | gcactgtgtt attttcacag tggagacacg tggcaaggca |
| | ggagggccct cagctcctag |
| 2761 | ggctgtcgaa tagaggagga gagagaaatg gtctagccag |
| | ggttacaagg gcacaatcat |
| 2821 | gaccatttga tccaagtgtg atcgaaagct gttaatgtgc |
| | tctctgtata aacaatttgc |
| 2881 | tccaaatatt ttgtttccct tttttgtgtg gctggtagtg |
| | gcattgctga tgttttggtg |
| 2941 | tatatgctgt atccttgcta ccatattggg aacagccaaa |
| | agaagttata gaacaagaat |
| 3001 | ttaaggtgac tctatctga |

[0374] An exemplary human SIGLEC8 amino acid sequence is set forth below (SEQ ID NO: 138; GenBank Accession No: Q9NYZ4.2, Version 2, incorporated herein by reference):

| | |
|---|---|
| 1 | mlllllllpl lwgtkgmegd rqygdgyllq vqelvtvqeg |
| | lcvhvpcsfs ypqdgwtdsd |
| 61 | pvhgywfrag drpyqdapva tnnpdrevqa etqgrfqllg |
| | diwsndcsls irdarkrdkg |
| 121 | syffrlergs mkwsyksqln yktkqlsvfv talthrpdil |
| | ilgtlesghs rnltcsvpwa |
| 181 | ckqgtppmis wigasvsspg pttarssvlt ltpkpqdhgt |
| | sltcqvtlpg tgvtttstvr |
| 241 | ldvsyppwnl tmtvfqgdat astalgngss lsvlegqslr |
| | lvcavnsnpp arlswtrgsl |
| 301 | tlcpsrssnp gllelprvhv rdegeftcra qnaqgsqhis |
| | lslslqnegt gtsrpvsqvt |
| 361 | laavggagat alaflsfcii fiivrscrkk sarpaagvgd |
| | tgmedakair gsasqgplte |
| 421 | swkdgnplkk pppavapssg eegelhyatl sfhkvkpqdp |
| | qgqeatdsey seikihkret |
| 481 | aetqaclrnh npsskevrg |

[0375] An exemplary human SIGLEC8 nucleic acid sequence is set forth below (SEQ ID NO: 139; GenBank Accession No: NM_014442.2, Version 2, incorporated herein by reference):

| | |
|---|---|
| 1 | agtttctgag agaagaaccc tgaggaacag acgttccctg |
| | gcggccctgg cgccttcaaa |
| 61 | cccagacatg ctgctgctgc tgctgctgct gcccctgctc |
| | tgggggacaa aggggatgga |
| 121 | gggagacaga caatatgggg atggttactt gctgcaagtg |
| | caggagctgg tgacggtgca |
| 181 | ggagggcctg tgtgtccatg tgccctgctc cttctcctac |
| | ccccaggatg gctggactga |
| 241 | ctctgaccca gttcatggct actggttccg ggcaggagac |
| | agaccatacc aagacgctcc |
| 301 | agtggccaca aacaacccag acagagaagt gcaggcagag |
| | acccagggcc gattccaact |
| 361 | ccttggggac atttggagca acgactgctc cctgagcatc |
| | agagacgcca ggaagaggga |
| 421 | taaggggtca tatttctttc ggctagagag aggaagcatg |
| | aaatggagtt acaaatcaca |
| 481 | gttgaattac aaaactaagc agctgtctgt gtttgtgaca |
| | gccctgaccc ataggcctga |
| 541 | catcctcatc ctagggaccc tagagtctgg ccactccagg |
| | aacctgacct gctctgtgcc |
| 601 | ctgggcctgt aagcagggga caccccccat gatctcctgg |
| | attggggcct ccgtgtcctc |
| 661 | cccgggcccc actactgccc gctcctcagt gctcaccctt |
| | accccaaagc cccaggacca |
| 721 | cggcaccagc ctcacctgtc aggtgacctt gcctgggaca |
| | ggtgtgacca cgaccagtac |
| 781 | cgtccgcctc gatgtgtcct accctccttg gaacttgacc |
| | atgactgtct tccaaggaga |
| 841 | tgccacagca tccacagccc tgggaaatgg ctcatctctt |
| | tcagtccttg agggccagtc |
| 901 | tctgcgcctg gtctgtgctg tcaacagcaa tccccctgcc |
| | aggctgagct ggacccgggg |
| 961 | gagcctgacc ctgtgcccct cacggtcctc aaaccctggg |
| | ctgctggagc tgcctcgagt |
| 1021 | gcacgtgagg gatgaagggg aattcacctg ccgagctcag |
| | aacgctcagg gctcccagca |
| 1081 | catttccctg agcctctccc tgcagaatga gggcacaggc |
| | acctcaagac ctgtatcaca |
| 1141 | agtgacactg gcagcagtcg ggggagctgg agccacagcc |
| | ctggccttcc tgtccttctg |
| 1201 | catcatcttc atcatagtga ggtcctgcag gaagaaatcg |
| | gcaaggccag cagcgggcgt |
| 1261 | gggggataca ggcatggaag atgcaaaggc catcaggggc |
| | tcggcctctc agggacccct |
| 1321 | gactgaatcc tggaaagatg gcaaccccct gaagaagcct |
| | cccccagctg ttgccccctc |
| 1381 | gtcaggggag gaaggagagc tccattatgc aaccctcagc |
| | ttccataaag tgaagcctca |
| 1441 | ggacccgcag ggacaggagg ccactgacag tgaatactcg |
| | gagatcaaga tccacaagcg |
| 1501 | agaaactgca gagactcagg cctgtttgag gaatcacaac |
| | ccctccagca aagaagtcag |
| 1561 | aggctgattc tcatagaaca agaaccctct agagccccat |
| | gctatgcagt aggtcaccag |
| 1621 | ggctccctcc tcctgtctaa ccaaaacttg gaccaatgtc |
| | tcccctttcc ccggctacca |
| 1681 | gggacccatc cctgcctcta gcttctacta cccaccattc |
| | tcctctcgac ctctctgagg |
| 1741 | ttgactattt tagattccac atagagatga ggtcatgtgg |
| | tacttgcctc tctgtgtgtg |
| 1801 | gctcatttta cacaaaaaaa tatcccctag gttcatccat |
| | gttctctcaa atgacagaat |
| 1861 | caagcactga atattttttt ttctttgaga gatggagttt |
| | cgctctgttg cccaggctgg |
| 1921 | agtgcagtgg ttcaatctct gctcactgca acctccacct |
| | cctgggttca aacgattctc |
| 1981 | ctgcctcagc ttcccaagta gctggtacta caggcgtgtg |
| | tcaccacgcc cagctaattt |
| 2041 | ttgtattttt tagtagagac ggggtttcac tataagtggg |
| | ccaggctagt ctcaaactcc |
| 2101 | tgacctcaag tgatctgcct gccttggcct cccaaagtgc |
| | tgggatttca ggcatgagcc |
| 2161 | accgcaccca gcttgcattg aatattttca aggagctaaa |
| | agaagatttt aaatggtctc |
| 2221 | acaaaaacag ataaatattt gcacagatgg gtgtgctaat |
| | cattgtgcct tgatggttcc |
| 2281 | acgatgtatc cgggtgtgga aatctcactg ggtctctctc |
| | aaggccactc ggctactcag |
| 2341 | gacagggctg gaatttaaag cctgtccgat tctgaggtct |
| | cttctctcat ctagcactga |
| 2401 | gtcaagcaat cagcaggctg ggcacccctt agccataagt |
| | tttcaggaaa taaattcctt |
| 2461 | gagggcattg acttttacaa aagagggagc agcaatggcc |
| | tagagtctca ggaacaagac |
| 2521 | aggtgcactg aggagatgaa ggccgggacc ccctgcccaa |
| | cctgtatggc gggtctgtac |
| 2581 | ttattttgtt tacccccaat ttaaaacgtt tttttttatt |
| | gcaggttgtt tgtttgatat |
| 2641 | ggtttggctg tgtccccacc caaatcttat ctagaattgt |
| | aatcagaatt ataatcccca |
| 2701 | tgtgttgggg gagggacctg gtgggaggtg ataggatcat |
| | gggggtggtt cccccatgct |
| 2761 | gttctgatag tgagtgagtt atcacgagat ctgatggttt |
| | tgtaagtggt ggtttcccct |
| 2821 | gctcttctct cttgcctgcc accatgtaag atgtgcctgg |
| | ttccccttcc gccatgattg |
| 2881 | taagtttcct gaggcctccc ccgccatgtg gaactgtgag |
| | tcaattacac ctctttcatt |
| 2941 | tataaattaa aaaaaaaaaa aaaaaaa |

[0376] An exemplary human FAIM3/TOSO amino acid sequence is set forth below (SEQ ID NO: 140; GenBank Accession No: 060667.1, Version 1, incorporated herein by reference):

| | |
|---|---|
| 1 | mdfwlwplyf lpvsgalril pevkvegelg gsvtikcplp |
| | emhvriylcr emagsgtcgt |
| 61 | vvsttnfika eykgrvtlkq yprknlflve vtqltesdsg |
| | vyacgagmnt drgktqkvtl |
| 121 | nvhseyepsw eeqpmpetpk wfhlpylfqm payassskfv |
| | trvttpaqrg kvppvhhssp |
| 181 | ttqithrprv srassvagdk prtflpstta skisalegll |
| | kpqtpsynhh trlhrqrald |
| 241 | ygsqsgregq gfhiliptil glfllallgl vvkraverrk |
| | alsrrarrla vrmralessq |
| 301 | rprgsprprs qnniysacpr rargadaagt geapvpgpga |
| | plppaplqvs espwlhapsl |
| 361 | ktsceyvsly hqpaammeds dsddyinvpa |

[0377] An exemplary human FAIM3/TOSO nucleic acid sequence is set forth below (SEQ ID NO: 141; GenBank Accession No: BC006401.2, Version 2, incorporated herein by reference):

| | |
|---|---|
| 1 | atttcctcat cgtcaagctt tgttcctcgt gggggctaga |
| | aatctctttc cagttccaga |
| 61 | ttgtgaaggg ttcctgagta agcagcgtgt ctccatcccc |
| | ctctctaggg gctcttggat |
| 121 | ggaccttgca ctctagaagg gacaatggac ttctggcttt |
| | ggccacttta cttcctgcca |
| 181 | gtatcggggg ccctgaggat cctcccagaa gtaaaggtag |
| | agggggagct gggcggatca |
| 241 | gttaccatca agtgcccact tcctgaaatg catgtgagga |
| | tatatctgtg ccgggagatg |
| 301 | gctggatctg gaacatgtgg taccgtggta tccaccacca |
| | acttcatcaa ggcagaatac |
| 361 | aagggccgag ttactctgaa gcaataccca cgcaagaatc |
| | tgttcctagt ggaggtaaca |
| 421 | cagctgacag aaagtgacag cggagtctat gcctgcggag |
| | cgggcatgaa cacagaccgg |
| 481 | ggaaagaccc agaaagtcac cctgaatgtc cacagtgaat |
| | acgagccatc atgggaagag |
| 541 | cagccaatgc ctgagactcc aaaatggttt catctgccct |
| | atttgttcca gatgcctgca |
| 601 | tatgccagtt cttccaaatt cgtaaccaga gttaccacac |
| | cagctcaaag gggcaaggtc |
| 661 | cctccagttc accactcctc ccccaccacc caaatcaccc |
| | accgccctcg agtgtccaga |
| 721 | gcatcttcag tagcaggtga caagccccga accttcctgc |
| | catccactac agcctcaaaa |
| 781 | atctcagctc tggaggggct gctcaagccc cagacgccca |
| | gctacaacca ccacaccagg |
| 841 | ctgcacaggc agagagcact ggactatggc tcacagtctg |
| | ggagggaagg ccaaggattt |
| 901 | cacatcctga tcccgaccat cctgggcctt ttcctgctgg |
| | cacttctggg gctggtggtg |
| 961 | aaaagggccg ttgaaaggag gaaagccctc tccaggcggg |
| | cccgccgact ggccgtgagg |
| 1021 | atgcgcgccc tggagagctc ccagaggccc cgcgggtcgc |
| | cgcgaccgcg ctcccaaaac |
| 1081 | aacatctaca gcgcctgccc gcggcgcgct cgtggagcgg |
| | acgctgcagg cacaggggag |
| 1141 | gcccccgttc ccggccccgg agcgccgttg ccccccgccc |
| | cgctgcaggt gtctgaatct |
| 1201 | ccctggctcc atgccccatc tctgaagacc agctgtgaat |
| | acgtgagcct ctaccaccag |
| 1261 | cctgccgcca tgatggagga cagtgattca gatgactaca |
| | tcaatgttcc tgcctgacaa |
| 1321 | ctccccagct atcccccaac cccaggctcg gactgtggtg |
| | ccaaggagtc tcatctatct |
| 1381 | gctgatgtcc aatacctgct tcatgtgttc tcagagccct |
| | catcacttcc catgccccat |
| 1441 | ctcgactccc atccccatct atctgtgccc tgagcatggc |
| | tctgccccca ggtcgtcttg |
| 1501 | cacaccttgg cagccccctg tagttgacag gtaagctgta |
| | ggcatgtaga gcaattgtcc |
| 1561 | caatgccact tgcttccttt ccaagccgtc gaacagactg |
| | tgggatttgc agagtgtttc |
| 1621 | ttccatgtct ttgaccacag ggttgttgct gcccaggctc |
| | tagatcacat ggcatcaggc |
| 1681 | tggggcagag gcatagctat tgtctcgggc atccttccca |
| | gggttgggtc ttacacaaat |
| 1741 | agaaggctct tgctctgagt tatgtgacat gcctcagccc |
| | catggactaa gcaggggtct |
| 1801 | ggtataaaaa cactcctgga aacgcctttg ccctgatcca |
| | aatgttagca cttgctagtg |
| 1861 | aacgtctact tatctcaagt tctatgctaa aggcaattta |
| | tcttgatgtg atgataaacc |
| 1921 | aaacttatta gcaagatatg catatatatc aaaaaaaaaa |
| | aaaaaaaa |

[0378] An exemplary human MAGEA2B amino acid sequence is set forth below (SEQ ID NO: 142; GenBank Accession No: AAI12161.1, Version 1, incorporated herein by reference):

| | |
|---|---|
| 1 | mdfwlwplyf lpvsgalril pevkvegelg gsvtikcplp |
| | emhvriylcr emagsgtcgt |
| 61 | vvsttnfika eykgrvtlkq yprknlflve vtqltesdsg |
| | vyacgagmnt drgktqkvtl |
| 121 | nvhseyepsw eeqpmpetpk wfhlpylfqm payassskfv |
| | trvttpaqrg kvppvhhssp |
| 181 | ttqithrprv srassvagdk prtflpstta skisalegll |
| | kpqtpsynhh trlhrqrald |
| 241 | ygsqsgregq gfhiliptil glfllallgl vvkraverrk |
| | alsrrarrla vrmralessq |
| 301 | rprgsprprs qnniysacpr rargadaagt geapvpgpga |
| | plppaplqvs espwlhapsl |
| 361 | ktsceyvsly hqpaammeds dsddyinvpa |

[0379] An exemplary human MAGEA2B nucleic acid sequence is set forth below (SEQ ID NO: 143; GenBank Accession No: NM_001321400.1, Version 1, incorporated herein by reference):

| | |
|---|---|
| 1 | ttgcgcattg gaggtcagag gacagcgaga ttctcgccct |
| | gagcaacggc ctgacgtcgg |
| 61 | cggagggaag caggcgcagg ctccgtgagg aggcaagaat |
| | ccgggctttg cccctgcaat |
| 121 | caacccacgg aagctccggg aatggcggcc aagcacgcgg |
| | atcctgacgt tcacatatct |
| 181 | cagggagttg atgaccttgt tttcagaagg tgactcaggt |
| | caacacaggg gcccccatct |
| 241 | ggtcgacaga tgcagtggtt ctaggatctg ccaagcatcc |
| | aggtggagag cctgaggaat |
| 301 | caggagctcc aggaaccagg cagtgaggcc ttggtctgag |
| | tcagtgtcct caggtcacag |
| 361 | agcagagggg acgcagacag tgccaacact gaaggttctg |
| | agggggacag gctgacaagt |
| 421 | aggacccgag gcactggagg agcattgaag gagaagatct |
| | gcctgtgggt cttcattgcc |
| 481 | cagctcctgc ccgcactcct gcctgctgcc ctgaccagag |
| | tcatcatgcc tcttgagcag |
| 541 | aggagtcagc actgcaagcc tgaagaaggc cttgaggccc |
| | gaggagaggc cctgggcctg |
| 601 | gtgggtgcgc aggctcctgc tactgaggag cagcagaccg |
| | cttcttcctc ttctactcta |
| 661 | gtggaagtta ccctggggga ggtgcctgct gccgactcac |
| | cgagtcctcc ccacagtcct |
| 721 | cagggagcct ccagcttctc gactaccatc aactacactc |
| | tttggagaca atccgatgag |
| 781 | ggctccagca accaagaaga ggaggggcca agaatgtttc |
| | ccgacctgga gtccgagttc |
| 841 | caagcagcaa tcagtaggaa gatggttgag ttggttcatt |
| | ttctgctcct caagtatcga |
| 901 | gccagggagc cggtcacaaa ggcagaaatg ctggagagtg |
| | tcctcagaaa ttgccaggac |
| 961 | ttctttcccg tgatcttcag caaagcctcc gagtacttgc |
| | agctggtctt tggcatcgag |
| 1021 | gtggtggaag tggtccccat cagccacttg tacatccttg |
| | tcacctgcct gggcctctcc |
| 1081 | tacgatggcc tgctgggcga caatcaggtc atgcccaaga |
| | caggcctcct gataatcgtc |
| 1141 | ctggccataa tcgcaataga gggcgactgt gcccctgagg |
| | agaaaatctg ggaggagctg |
| 1201 | agtatgttgg aggtgtttga ggggagggag gacagtgtct |
| | tcgcacatcc caggaagctg |
| 1261 | ctcatgcaag atctggtgca ggaaaactac ctggagtacc |
| | ggcaggtgcc cggcagtgat |
| 1321 | cctgcatgct acgagttcct gtggggtcca agggccctca |
| | ttgaaaccag ctatgtgaaa |
| 1381 | gtcctgcacc atacactaaa gatcggtgga gaacctcaca |
| | tttcctaccc acccctgcat |
| 1441 | gaacgggctt tgagagaggg agaagagtga gtctcagcac |
| | atgttgcagc cagggccagt |
| 1501 | gggagggggt ctgggccagt gcaccttcca gggccccatc |
| | cattagcttc cactgcctcg |
| 1561 | tgtgatatga ggcccattcc tgcctctttg aagagagcag |
| | tcagcattct tagcagtgag |
| 1621 | tttctgttct gttggatgac tttgagattt atctttgttt |
| | cctgttggaa ttgttcaaat |
| 1681 | gttcctttta acaaatggtt ggatgaactt cagcatccaa |
| | gtttatgaat gacagtagtc |
| 1741 | acacatagtg ctgtttatat agtttagggg taagagtcct |
| | gttttttatt cagattggga |
| 1801 | aatccattcc attttgtgag ttgtcacata ataacagcag |
| | tggaatatgt atttgcctat |
| 1861 | attgtgaacg aattagcagt aaaatacatg atacaaggaa |
| | ctcaaaagat agttaattct |
| 1921 | tgccttatac ctcagtctat tatgtaaaat taaaaatatg |
| | tgtatgtttt tgcttctttg |
| 1981 | agaatgcaaa agaaattaaa tctgaataaa taattcttcc |
| | tgttca |

[0380] An exemplary human MKRN9P amino acid sequence is set for the below (SEQ ID NO: 144; GenBank Accession No: Q6NVV0.1, Version 1, incorporated herein by reference):

| | |
|---|---|
| 1 | mllaavgdde ltdsedesdl fheeledfyd ldl |

[0381] An exemplary human MKRN9P nucleic acid sequence is set forth below (SEQ ID NO: 145; GenBank Accession No: NR_033410.1, Version 1, incorporated herein by reference):

| | |
|---|---|
| 1 | gacgtggagc aggcagggac tgagcgggtg cctcagtgtc |
| | ctacccctcc cttcgccggg |
| 61 | cctctcagtc ctctcccagc agctggaccg gaactatgtg |
| | atcccggaag ttccggggcc |
| 121 | ttttctgtgt gggataaaca gtaatggcgg aggctgcagc |
| | tctcagacca acagccacaa |
| 181 | catcaggggc ggcagtggcg gcagcggcgg cggcggcagc |
| | agcggcctcc cctaccagga |
| 241 | tccccacagt caccattctg tccccagggg gcaggcgagg |
| | gggccgcggc agcgatggca |
| 301 | gcggcggcag ctggactaaa caggtcacct gcaggtattt |
| | tatgcatggg gtttataagg |
| 361 | aaggagataa ctgttgcaag ttgcatgacc tctctgacag |
| | tccgtataat gtagtgtaca |
| 421 | agagtttgca gccagggtac tgtatttatg gagactgctg |
| | cagatatgaa catagcaagc |
| 481 | cattgaaaca gaaagaagca actgctacag agctaactac |
| | aaagtcatcc cttgctgctt |
| 541 | cctcaagtct ctcatggata gtcggaccac ttgttgaaat |
| | gaatacgggt gaagctgagt |
| 601 | caagaaattc aaactttgta actgtaggag caggttcaga |
| | gggctgggtg aatgctgttg |
| 661 | agtttgttcc tgggcaaccc tactgtggcc gcactgcgcc |
| | ttcctgcact gaagcacccc |
| 721 | tgcagggctc agtgaccaag gaagaatcag agaaagagca |
| | aactgccgtg gaaacaaaga |
| 781 | agcagctgtg cccctatgct gcagtgggag agtgccgata |
| | tcgggagaac ttgtgtgtat |
| 841 | atggagattc gtgtgacatg tgtggctgca ggtcctgcat |
| | ctgatggatg ctgcccagag |
| 901 | atcacagcat ataaaatcat gctttgaggc ccatgagaaa |
| | gacagggagc tctcatttgc |
| 961 | tgtgcagcgc agcgaggaaa tggtgtgtga gagctgcatg |
| | gagatgatct atgagaaagc |
| 1021 | caaccccaga cagcaccgct tcgggatcct ctccaactgc |
| | aaccacacct actgtcttaa |
| 1081 | gtgcattcgc aagtggagga gtgctaagca gtttgagagc |
| | aagatcataa agtcctgccc |
| 1141 | agaatgtcgg atcacatcta actttgtcgt tccaagtgag |
| | tactgtgtgg aggagaaaga |
| 1201 | agagaagcag aaactcattc tgaaatacaa ggaggcaatg |
| | agcaacaagg cgtgcaggta |
| 1261 | ttttgatgaa ggacatggga gctgcccgtt tggagggaac |
| | ggtttttata agcatgtgta |
| 1321 | ccctgatggc cgtagagagg agccacagag acagaaggtg |
| | ggaacatcaa gcagataccc |
| 1381 | ggcccaatga aggaaccact tctgggaact cattgaggaa |
| | agagagaaca gcagcccctt |
| 1441 | tgacaacgat gaagaagagg ttgtcacctt tgagctgggt |
| | gagttgttgc ttatgctttt |
| 1501 | ggctgcagtt ggggacgatg aactaacaga ctctgaagat |
| | gagagcgact tgtttcatga |
| 1561 | ggagctggaa gatttttatg acttggatct atagcaacct |
| | tgtgtggcgt gtgaactggt |
| 1621 | ctgctgaccc cagacagcag ctgttccctg tggtggtgtg |
| | gcagtgcctg tgttctctcc |
| 1681 | taggcaggcc tgtcaactcc aggtgctggc ataagaattt |
| | ttacccaggg cctgtctttt |
| 1741 | caacccctca cctttcccca aggagtgtgt tgttttccct |
| | cttgaaaaaa agttagaaaa |
| 1801 | ataaatctta aagttagttt tctgaaa |

[0382] An exemplary human MAGEC1 amino acid sequence is set forth below (SEQ ID NO: 146; GenBank Accession No: 060732.3, Version 3, incorporated herein by reference):

| | |
|---|---|
| 1 | mgdkdmptag mpsllqssse spqscpeged sqsplqipqs |
| | spesddtlyp lqspqsrseg |
| 61 | edssdplqrp pegkdsqspl qipqsspegd dtqsplqnsq |
| | sspegkdsls pleisqsppe |
| 121 | gedvqsplqn passffssal lsifqsspes tqspfegfpq |
| | svlqipvsaa ssstlvsifq |
| 181 | sspestqspf egfpqsplqi pvsrsfsstl lsifqssper |
| | tqstfegfaq splqipvsps |
| 241 | ssstllslfq sfsertqstf egfaqsslqi pvspsfsstl |
| | vslfqssper tqstfegfpq |
| 301 | splqipvsss ssstllslfq ssperthstf egfpqsllqi |
| | pmtssfsstl lsifqsspes |
| 361 | aqstfegfpq splqipgsps fsstllslfq ssperthstf |
| | egfpqsplqi pmtssfsstl |
| 421 | lsilqsspes aqsafegfpq splqipvsss fsytllslfq |
| | ssperthstf egfpqsplqi |
| 481 | pvssssssst llslfqsspe ctqstfegfp qsplqipqsp |
| | pegenthspl qivpslpewe |
| 541 | dslsphyfpq sppqgedsls phyfpqsppq gedslsphyf |
| | pqspqgedsl sphyfpqspp |
| 601 | qgedsmsply fpqsplqgee fqsslqspvs icssstpssl |
| | pqsfpessqs ppegpvqspl |
| 661 | hspqsppegm hsqsplqspe sapegedsls plqipqsple |
| | gedslsslhf pqsppeweds |
| 721 | lsplhfpqfp pqgedfqssl qspvsicsss tslslpqsfp |
| | espqsppegp aqsplqrpvs |
| 781 | sffsytlasl lqsshespqs ppegpaqspl qspvssfpss |
| | tssslsqssp vssfpsstss |
| 841 | slsksspesp lqspvisfss stslspfsee ssspvdeyts |
| | ssdtllesds ltdseslies |
| 901 | eplftytlde kvdelarfll lkyqvkqpit kaemltnvis |
| | rytgyfpvif rkarefieil |
| 961 | fgislrevdp ddsyvfvntl dltsegclsd eqgmsqnrll |
| | ililsiifik gtyaseeviw |
| 1021 | dvlsgigvra grehfafgep relltkvwvq ehyleyrevp |
| | nssppryefl wgprahsevi |
| 1081 | krkvveflam lkntvpitfp ssykdalkdv eeraqaiidt |
| | tddstatesa sssvmspsfs |
| 1141 | se |

[0383] An exemplary human MAGEC1 nucleic acid sequence is set forth below (SEQ ID NO: 147; GenBank Accession No: NM_005462.4, Version 4, incorporated herein by reference):

| | |
|---|---|
| 1 | gctttgccgg atgtgctttc ccggcggcca tcttgggagt |
| | ctgaaggacc tgaggcattt |
| 61 | tgtgacgagg atcgtctcag gtcagcggag ggaggagact |
| | tatagaccta tccagtcttc |
| 121 | aaggtgctcc agaaagcagg agttgaagac ctgggtgtga |
| | gggacacata catcctaaaa |
| 181 | gcaccacagc agaggaggcc caggcagtgc caggagtcaa |
| | ggttcccaga agacaaaccc |
| 241 | cctaggaaga caggcgacct gtgaggccct agagcaccac |
| | cttaagagaa gaagagctgt |
| 301 | aagccggcct ttgtcagagc catcatgggg gacaaggata |
| | tgcctactgc tgggatgccg |
| 361 | agtcttctcc agagttcctc tgagagtcct cagagttgtc |
| | ctgaggggga ggactcccag |
| 421 | tctcctctcc agattcccca gagttctcct gagagcgacg |
| | acaccctgta tcctctccag |
| 481 | agtcctcaga gtcgttctga gggggaggac tcctcggatc |
| | ctctccagag acctcctgag |
| 541 | gggaaggact cccagtctcc tctccagatt ccccagagtt |
| | ctcctgaggg cgacgacacc |
| 601 | cagtctcctc tccagaattc tcagagttct cctgagggga |
| | aggactccct gtctcctcta |
| 661 | gagatttctc agagccctcc tgagggtgag gatgtccagt |
| | ctcctctgca gaatcctgcg |
| 721 | agttccttct tctcctctgc tttattgagt attttccaga |
| | gttcccctga gagtactcaa |
| 781 | agtccttttg agggttttcc ccagtctgtt ctccagattc |
| | ctgtgagcgc cgcctcctcc |
| 841 | tccactttag tgagtatttt ccagagttcc cctgagagta |
| | ctcaaagtcc ttttgagggt |
| 901 | tttccccagt ctccactcca gattcctgtg agccgctcct |
| | tctcctccac tttattgagt |
| 961 | attttccaga gttcccctga gagaactcag agtacttttg |
| | agggttttgc ccagtctcct |
| 1021 | ctccagattc ctgtgagccc ctcctcctcc tccactttac |
| | tgagtctttt ccagagtttc |
| 1081 | tctgagagaa ctcagagtac ttttgagggt tttgcccagt |
| | cttctctcca gattcctgtg |
| 1141 | agcccctcct tctcctccac tttagtgagt cttttccaga |
| | gttcccctga gagaactcag |
| 1201 | agtacttttg agggttttcc ccagtctcct ctccagattc |
| | ctgtgagctc ctcctcctcc |
| 1261 | tccactttat tgagtctttt ccagagttcc cctgagagaa |
| | ctcacagtac ttttgagggt |
| 1321 | tttccccagt ctcttctcca gattcctatg acctcctcct |
| | tctcctctac tttattgagt |
| 1381 | attttccaga gttctcctga gagtgctcaa agtacttttg |
| | agggttttcc ccagtctcct |
| 1441 | ctccagattc ctgggagccc ctccttctcc tccactttac |
| | tgagtctttt ccagagttcc |
| 1501 | cctgagagaa ctcacagtac ttttgagggt tttccccagt |
| | ctcctctcca gattcctatg |
| 1561 | acctcctcct tctcctctac tttattgagt attttacaga |
| | gttctcctga gagtgctcaa |
| 1621 | agtgcttttg agggttttcc ccagtctcct ctccagattc |
| | ctgtgagctc ctctttctcc |
| 1681 | tacactttat tgagtctttt ccagagttcc cctgagagaa |
| | ctcacagtac ttttgagggt |
| 1741 | tttccccagt ctcctctcca gattcctgtg agctcctcct |
| | cctcctcctc cactttattg |
| 1801 | agtcttttcc agagttcccc tgagtgtact caaagtactt |
| | ttgagggttt tccccagtct |
| 1861 | cctctccaga ttcctcagag tcctcctgaa ggggagaata |
| | cccattctcc tctccagatt |
| 1921 | gttccaagtc ttcctgagtg ggaggactcc ctgtctcctc |
| | actactttcc tcagagccct |
| 1981 | cctcaggggg aggactccct atctcctcac tactttcctc |
| | agagccctcc tcagggggag |
| 2041 | gactccctgt ctcctcacta ctttcctcag agccctcagg |
| | gggaggactc cctgtctcct |
| 2101 | cactactttc ctcagagccc tcctcagggg gaggactcca |
| | tgtctcctct ctactttcct |
| 2161 | cagagtcctc ttcaggggga ggaattccag tcttctctcc |
| | agagccctgt gagcatctgc |
| 2221 | tcctcctcca ctccatccag tcttccccag agtttccctg |
| | agagttctca gagtcctcct |
| 2281 | gaggggcctg tccagtctcc tctccatagt cctcagagcc |
| | ctcctgaggg gatgcactcc |
| 2341 | caatctcctc tccagagtcc tgagagtgct cctgaggggg |
| | aggattccct gtctcctctc |
| 2401 | caaattcctc agagtcctct tgagggagag gactccctgt |
| | cttctctcca ttttcctcag |
| 2461 | agtcctcctg agtgggagga ctccctctct cctctccact |
| | ttcctcagtt tcctcctcag |
| 2521 | ggggaggact tccagtcttc tctccagagt cctgtgagta |
| | tctgctcctc ctccacttct |
| 2581 | ttgagtcttc cccagagttt ccctgagagt cctcagagtc |
| | ctcctgaggg gcctgctcag |
| 2641 | tctcctctcc agagacctgt cagctccttc ttctcctaca |
| | ctttagcgag tcttctccaa |
| 2701 | agttcccatg agagtcctca gagtcctcct gaggggcctg |
| | cccagtctcc tctccagagt |
| 2761 | cctgtgagct ccttcccctc ctccacttca tcgagtcttt |
| | cccagagttc tcctgtgagc |
| 2821 | tccttcccct cctccacttc atcgagtctt tccaagagtt |
| | cccctgagag tcctctccag |
| 2881 | agtcctgtga tctccttctc ctcctccact tcattgagcc |
| | cattcagtga agagtccagc |
| 2941 | agcccagtag atgaatatac aagttcctca gacaccttgc |
| | tagagagtga ttccttgaca |
| 3001 | gacagcgagt ccttgataga gagcgagccc ttgttcactt |
| | atacactgga tgaaaaggtg |
| 3061 | gacgagttgg cgcggtttct tctcctcaaa tatcaagtga |
| | agcagcctat cacaaaggca |
| 3121 | gagatgctga cgaatgtcat cagcaggtac acgggctact |
| | ttcctgtgat cttcaggaaa |
| 3181 | gcccgtgagt tcatagagat actttttggc atttccctga |
| | gagaagtgga ccctgatgac |
| 3241 | tcctatgtct ttgtaaacac attagacctc acctctgagg |
| | ggtgtctgag tgatgagcag |
| 3301 | ggcatgtccc agaaccgcct cctgattctt attctgagta |
| | tcatcttcat aaagggcacc |
| 3361 | tatgcctctg aggaggtcat ctgggatgtg ctgagtggaa |
| | taggggtgcg tgctgggagg |
| 3421 | gagcactttg cctttgggga gcccagggag ctcctcacta |
| | aagtttgggt gcaggaacat |
| 3481 | tacctagagt accgggaggt gcccaactct tctcctcctc |
| | gttacgaatt cctgtggggt |
| 3541 | ccaagagctc attcagaagt cattaagagg aaagtagtag |
| | agtttttggc catgctaaag |
| 3601 | aataccgtcc ctattacctt tccatcctct tacaaggatg |
| | ctttgaaaga tgtggaagag |
| 3661 | agagcccagg ccataattga caccacagat gattcgactg |
| | ccacagaaag tgcaagctcc |
| 3721 | agtgtcatgt cccccagctt ctcttctgag tgaagtctag |
| | ggcagattct tccctctgag |
| 3781 | tttgaagggg gcagtcgagt ttctacgtgg tggagggcct |
| | ggttgaggct ggagagaaca |
| 3841 | cagtgctatt tgcatttctg ttccatatgg gtagttatgg |
| | ggtttacctg ttttactttt |
| 3901 | gggtattttt caaatgcttt tcctattaat aacaggttta |
| | aatagcttca gaatcctagt |
| 3961 | ttatgcacat gagtcgcaca tgtattgctg tttttctggt |
| | ttaagagtaa cagtttgata |
| 4021 | ttttgtaaaa acaaaaacac acccaaacac accacattgg |
| | gaaaaccttc tgcctcattt |
| 4081 | tgtgatgtgt cacaggttaa tgtggtgtta ctgtaggaat |
| | tttcttgaaa ctgtgaagga |
| 4141 | actctgcagt taaatagtgg aataaagtaa aggattgtta |
| | atgtttgcat ttcctcaggt |
| 4201 | cctttagtct gttgttcttg aaaactaaag atacatacct |
| | ggtttgcttg gcttacgtaa |
| 4261 | gaaagtagaa gaaagtaaac tgtaataaat aaaagtgtca |
| | gtgactcatt tatttgatga |
| 4321 | aaaaaaaaaa aaaaaaa |

[0384] An exemplary human PSG11 amino acid sequence is set forth below (SEQ ID NO: 148; GenBank Accession No: AAA60203.1, Version 1, incorporated herein by reference):

| | |
|---|---|
| 1 | mgpfpapsct qritwkglll tasllnfwnp pttaevtiea |
| | qppkvsegkd vlllvhnlpq |
| 61 | nlpgyfwykg emtdlyhyii syivdgkiii ygpaysgret |
| | vysnaslliq nvtrkdagty |
| 121 | tlhiikrgde treeirhftf tlyletpkpy isssnlnpre |
| | ameavrlicd petldasylw |
| 181 | wmngqslpvt hrlqlsktnr tlylfgvtky iagpyeceir |
| | npvsairsdp vtlnllpklp |
| 241 | ipyitinnln prenkdvlaf tcepksenyt yiwwlngqsl |
| | pvspgvkrpi enrililpsv |
| 301 | trnetgpyqc eirdrygglr snpvilnvly gpdlpriyps |
| | ftyyrsgenl dlscftesnp |
| 361 | paeyfwting kfqqsgqklf ipqitrnhsg lyacsvhnsa |
| | tgkeisksmt vkvsgpchgd |
| 421 | ltesqs |

[0385] An exemplary human PSG11 nucleic acid sequence is set forth below (SEQ ID NO: 149; GenBank Accession No: M58591.1, Version 1, incorporated herein by reference):

| | |
|---|---|
| 1 | cagccgtgct cagacagctt ctggatccta ggctcatctc |
| | cacagaggag aacacgcagg |
| 61 | cagcagagac catggggccc ttcccagccc cttcctgcac |
| | acagcgcatc acctggaagg |
| 121 | ggctcctgct cacagcatca cttttaaact tctggaaccc |
| | gcccaccact gccgaagtca |
| 181 | cgattgaagc ccagccaccc aaagtttctg aggggaagga |
| | tgttcttcta cttgtccaca |
| 241 | atttgcccca gaatcttcct ggctacttct ggtacaaagg |
| | ggaaatgacg gacctctacc |
| 301 | attacattat atcgtatata gttgatggta aaataattat |
| | atatgggcct gcatacagtg |
| 361 | gaagagaaac agtatattcc aacgcatccc tgctgatcca |
| | gaatgtcacc cggaaggatg |
| 421 | caggaaccta caccttacac atcataaagc gaggtgatga |
| | gactagagaa gaaattcgac |
| 481 | atttcacctt caccttatac ttggagactc ccaagcccta |
| | catctccagc agcaacttaa |
| 541 | accccaggga ggccatggag gctgtgcgct taatctgtga |
| | tcctgagact ctggacgcaa |
| 601 | gctacctatg gtggatgaat ggtcagagcc tccctgtgac |
| | tcacaggttg cagctgtcca |
| 661 | aaaccaacag gaccctctat ctatttggtg tcacaaagta |
| | tattgcagga ccctatgaat |
| 721 | gtgaaatacg gaacccagtg agtgccattc gcagtgaccc |
| | agtcaccctg aatctcctcc |
| 781 | cgaagctgcc catcccctac atcaccatca acaacttaaa |
| | ccccagggag aataaggatg |
| 841 | tcttagcctt cacctgtgaa cctaagagtg agaactacac |
| | ctacatttgg tggctaaacg |
| 901 | gtcagagcct ccccgtcagt cccggggtaa agcgacccat |
| | tgaaaacagg atactcattc |
| 961 | tacccagtgt cacgagaaat gaaacaggac cctatcaatg |
| | tgaaatacgg gaccgatatg |
| 1021 | gtggcctccg cagtaaccca gtcatcctaa atgtcctcta |
| | tggtccagac ctccccagaa |
| 1081 | tttacccttc attcacctat taccgttcag gagaaaacct |
| | cgacttgtcc tgcttcacgg |
| 1141 | aatctaaccc accggcagag tatttttgga caattaatgg |
| | gaagtttcag caatcaggac |
| 1201 | aaaagctctt tatcccccaa attactagaa atcatagcgg |
| | gctctatgct tgctctgttc |
| 1261 | ataactcagc cactggcaag gaaatctcca aatccatgac |
| | agtcaaagtc tctggtccct |
| 1321 | gccatggaga cctgacagag tctcagtcat gactgcaaca |
| | actgagacac tgagaaaaag |
| 1381 | aacaggctga taccttcatg aaattcaaga caaagaagaa |
| | aaaaactcaa tgttattgga |
| 1441 | ctaaataatc aaaaggataa tgttttcata attttttatt |
| | ggaaaatgtg ctgattcttt |
| 1501 | gaatgtttta ttctccagat ttatgaactt tttttcttca |
| | gcaattggta aagtatactt |
| 1561 | ttgtaaacaa aaattgaaat atttgctttt gctgtctatc |
| | tgaatgcccc agaattgtga |
| 1621 | aactattcat gagtattcat aggtttatgg taataaagtt |
| | atttgcacat gttccgta |

[0386] An exemplary human TAC3 amino acid sequence is set forth below (SEQ ID NO: 150; GenBank Accession No: AAQ89042.1, Version 1, incorporated herein by reference):

| | |
|---|---|
| 1 | mrimllftai lafslaqsfg avckepqeev vpgggrskrd |
| | pdlyqllqrl fkshsslegl |
| 61 | lkalsqastd pkestspekr dmhdffvglm gkrsvqpegk |
| | tgpflpsvrv prplhpnqlg |
| 121 | stgksslgte eqrpl |

[0387] An exemplary human TAC3 nucleic acid sequence is set forth below (SEQ ID NO: 151; GenBank Accession No: AY358679.1, Version 1, incorporated herein by reference):

| | |
|---|---|
| 1 | agtgactgca gccttcctag atcccctcca ctcggtttct |
| | ctctttgcag gagcaccggc |
| 61 | agcaccagtg tgtgagggga gcaggcagcg gtcctagcca |
| | gttccttgat cctgccagac |
| 121 | cacccagccc ccggcacaga gctgctccac aggcaccatg |
| | aggatcatgc tgctattcac |
| 181 | agccatcctg gccttcagcc tagctcagag ctttggggct |
| | gtctgtaagg agccacagga |
| 241 | ggaggtggtt cctggcgggg gccgcagcaa gagggatcca |
| | gatctctacc agctgctcca |
| 301 | gagactcttc aaaagccact catctctgga gggattgctc |
| | aaagccctga gccaggctag |
| 361 | cacagatcct aaggaatcaa catctcccga gaaacgtgac |
| | atgcatgact tctttgtggg |
| 421 | acttatgggc aagaggagcg tccagccaga gggaaagaca |
| | ggacctttct taccttcagt |
| 481 | gagggttcct cggccccttc atcccaatca gcttggatcc |
| | acaggaaagt cttccctggg |
| 541 | aacagaggag cagagacctt tataagactc tcctacggat |
| | gtgaatcaag agaacgtccc |
| 601 | cagctttggc atcctcaagt atcccccgag agcagaatag |
| | gtactccact tccggactcc |
| 661 | tggactgcat taggaagacc tctttccctg tcccaatccc |
| | caggtgcgca cgctcctgtt |
| 721 | accctttctc ttccctgttc ttgtaacatt cttgtgcttt |
| | gactccttct ccatcttttc |
| 781 | tacctgaccc tggtgtggaa actgcatagt gaatatcccc |
| | aaccccaatg ggcattgact |
| 841 | gtagaatacc ctagagttcc tgtagtgtcc tacattaaaa |
| | atataatgtc tctctctatt |
| 901 | cctcaacaat aaaggatttt tgcatatgaa aaaaaaaaaa |
| | aaaaaaaaaa aaaaaaaaaa |
| 961 | aaaaaaaaaa aa |

[0388] An exemplary human PSG8 amino acid sequence is set forth below (SEQ ID NO: 152; GenBank Accession No: Q9UQ74.2, Version 2, incorporated herein by reference):

| | |
|---|---|
| 1 | mgllsappct qritwkglll tasllnfwnp pttaqvtiea |
| | qptkvsegkd vlllvhnlpq |
| 61 | nitgyiwykg qirdlyhyit syvvdgqiii ygpaysgret |
| | iysnaslliq nvtqedagsy |
| 121 | tlhiimggde nrgvtghftf tlyletpkps isssklnpre |
| | ameaysltcd petpdasylw |
| 181 | wmngqslpms hrlqlsetnr tlfllgvtky tagpyeceir |
| | npvsasrsdp ftlnllpklp |
| 241 | kpyitinnlk prenkdvlnf tcepksenyt yiwwlngqsl |
| | pvsprvkrpi enrililpsv |
| 301 | trnetgpyqc eirdqyggir sypvtlnvly gpdlpriyps |
| | ftyyrsgevl ylscsadsnp |
| 361 | paqyswting kfqlsgqklf ipqittkhsg lyacsvrnsa |
| | tgkessksmt vkvsgkripv |
| 421 | slaigi |

[0389] An exemplary human PSG8 nucleic acid sequence is set forth below (SEQ ID NO: 153; GenBank Accession No: AH007519.2, Version 2, incorporated herein by reference):

| | |
|---|---|
| 1 | aggactctgc ttgcccaacc tgcagggtat gtttctgact gtgtaggtct gtgtgtgtcc |
| 61 | ttctgtgtgt gtgtgtgtgt gtgtgtgtgt gtgtgtgtgt gtgtgtgtgt gtgtgtgtgt |
| 121 | ctgcacaaag tgtgtgttga ggtttggtga aagaatcact gctgaaaaaa ggcagaggcc |
| 181 | tccacaattc ccagggacct gaaacacaga caaaaggaaa aacaggaggg acaaggaggc |
| 241 | aggactgaga gaggagggga cagagaggtg tcctgggcct gaccccgccc atgaacctga |
| 301 | gaggtgctcc tgccccggga agaagctcag cgcagaagga ggcaggacag cactgctgag |
| 361 | agctgtgctc aggaagcttc tggatcctag gctcatctcc acagaggaga acacacagac |
| 421 | agcagagacc atggggctcc tctcagcccc tccctgcaca cagcgcatca cctggaaggg |
| 481 | gctcctgctc acaggtgagg agagaacctc ctgggagagg acaggaggag gaagcagagt |
| 541 | gactggatgg ggtctccttg agagtatggg gtactaaaaa atgaaagaag ccagcacttt |
| 601 | gggaggctga ggcaggtgga tcatgagatc aggagttcaa gatcagtctg gccaacacag |
| 661 | tgaagccctg tctctactaa aaatacaaaa atttaaccag atattgtggt gtgctcctct |
| 721 | aatcctagct actcgggagg ctgaggcaga agaatcacgt gaacccagga ggcagaagtt |
| 781 | gcagctagct gagatagtgc catcgcacgc cagcctggga gacagtatga gactccatct |
| 841 | caaaaaaaaa aaaagagaaa aaagagaaaa aggaaagaag gctctattgg agcctggata |
| 901 | gggggaaata caccagagag ggacaggggt caaaacagga aagtcacagg aaccagaatt |
| 961 | ggtaagaggt aggaaaatct tgtgttctgt tttcctgatt aatcatcagg ggccaccaca |
| 1021 | ttttgaatat gataataata actgtatcag atgacacttc acataaaann nnnnnnnnnn |
| 1081 | nnnnnnnnnn nnnnnnnnnn nnnnnnnnnn nnnnnnnnnn nnnnnnnnnn nnnnnnnnnn |
| 1141 | nnnnnnnnnn nnnnnnnnnn nnnnnnnnaa aaatgccaag gtcagaagtg ttgaaggaat |
| 1201 | gggggtcatg gggctgacct tgacctagta ggatagtagg acacacacac atacacacac |
| 1261 | acagacacac atgccgcttt tgtgtgtgtg tgtgcgtgtg tttgtatgtg tgtgtgtctg |
| 1321 | tgtcttcaag gctgaggact gaagagaact tctcaggacc cagggcccca tgttttcaca |
| 1381 | ccaatacata gctctcaata ttgactgatg ctctctccac ctcctagcat cacttttaaa |
| 1441 | cttctggaac ccacccacga ctgcccaagt cacgattgaa gcccagccaa ccaaagtttc |
| 1501 | tgaggggaag gatgttcttc tacttgtcca caatttgccc cagaatctta ctggctacat |
| 1561 | ctggtacaaa gggcaaatca gggacctcta ccattacatt acatcatatg tagtagacgg |
| 1621 | tcaaataatt atatatgggc ctgcatacag tggacgagaa acaatatatt ccaatgcatc |
| 1681 | cctgctgatc cagaatgtca cccaggaaga cgcaggatcc tacaccttac acatcataat |
| 1741 | gggaggtgat gagaatagag gagtaactgg acatttcacc ttcaccttat atcgtgagtg |
| 1801 | attccacatg atccctgggt gttgggggac aggggtcact tctacttcac acacacagga |
| 1861 | ttgtcaggcc tggacattgc ctgtgtccct ctctgcatta tgtcccatgc tggggtttgg |
| 1921 | gcatttagtg caggacacac acagaggaga caaatttcaa cagatcagaa ttc |

[0390] An exemplary human HSPB3 amino acid sequence is set forth below (SEQ ID NO: 154; GenBank Accession No: Q12988.2, Version 2, incorporated herein by reference):

| | |
|---|---|
| 1 | makiilrhli eipvryqeef eargledcrl dhalyalpgp tivdlrktra aqsppvdsaa |
| 61 | etppregksh fqilldvvqf lpediiiqtf egwllikaqh gtrmdehgfi srsftrqykl |
| 121 | pdgveikdls avlchdgilv vevkdpvgtk |

[0391] An exemplary human HSPB3 nucleic acid sequence is set forth below (SEQ ID NO: 155; GenBank Accession No: CR450314.1, Version 1, incorporated herein by reference):

| | |
|---|---|
| 1 | atggcaaaaa tcattttgag gcacctcata gagattccag tgcgttacca ggaagagttt |
| 61 | gaagctcgag gtctagaaga ctgcaggctg gatcatgctt tatatgcact gcctgggcca |
| 121 | accatcgtgg acctgaggaa aaccagggca gcgcagtctc ctccagtgga ctcagcggca |
| 181 | gagacgccac cccgagaagg caaatcccac tttcagatcc tgctggacgt ggtccagttc |
| 241 | ctccctgaag acatcatcat tcagaccttc gaaggctggc tgctgataaa agcacaacac |
| 301 | ggaaccagaa tggatgagca cggttttatc tcaagaagct tcacccgaca gtacaaacta |
| 361 | ccagatggtg tggaaatcaa agatttgtct gcagtcctct gtcatgatgg aattttggtg |
| 421 | gtggaagtaa aggatccagt tgggactaag |

[0392] An exemplary human GJB6 amino acid sequence is set forth below (SEQ ID NO: 156; GenBank Accession No: 095452.2, Version 2, incorporated herein by reference):

| | |
|---|---|
| 1 | mdwgtlhtfi ggvnkhstsi gkvwitvifi frvmilvvaa qevwgdeqed fvcntlqpgc |
| 61 | knvcydhffp vshirlwalq lifvstpall vamhvayyrh ettrkfrrge krndfkdied |
| 121 | ikkqkvrieg slwwtytssi ffriifeaaf myvfyflyng yhlpwvlkcg idpcpnlvdc |
| 181 | fisrptektv ftifmisasv icmllnvael cylllkvcfr rskraqtqkn hpnhalkesk |
| 241 | qnemnelisd sgqnaitgfp s |

[0393] An exemplary human GJB6 nucleic acid sequence is set forth below (SEQ ID NO: 157; GenBank Accession No: AY297110.1, Version 1, incorporated herein by reference):

| | |
|---|---|
| 1 | atggattggg ggacgctgca cactttcatc gggggtgtca acaaacactc caccagcatc |
| 61 | gggaaggtgt ggatcacagt catctttatt ttccgagtca tgatcctcgt ggtggctgcc |
| 121 | caggaagtgt ggggtgacga gcaagaggac ttcgtctgca acacactgca accgggatgc |
| 181 | aaaaatgtgt gctatgacca ctttttcccg gtgtcccaca tccggctgtg ggccctccag |
| 241 | ctgatcttcg tctccacccc agcgctgctg gtggccatgc atgtggccta ctacaggcac |
| 301 | gaaaccactc gcaagttcag gcgaggagag aagaggaatg atttcaaaga catagaggac |
| 361 | attaaaaagc agaaggttcg gatagagggg tcgctgtggt ggacgtacac cagcagcatc |
| 421 | tttttccgaa tcatctttga agcagccttt atgtatgtgt tttacttcct ttacaatggg |
| 481 | taccacctgc cctgggtgtt gaaatgtggg attgacccct gccccaacct tgttgactgc |
| 541 | tttatttcta ggccaacaga gaagaccgtg tttaccattt ttatgatttc tgcgtctgtg |
| 601 | atttgcatgc tgcttaacgt ggcagagttg tgctacctgc tgctgaaagt gtgttttagg |
| 661 | agatcaaaga gagcacagac gcaaaaaaat caccccaatc atgccctaaa ggagagtaag |
| 721 | cagaatgaaa tgaatgagct gatttcagat agtggtcaaa atgcaatcac aggtttccca |
| 781 | agctaa |

[0394] An exemplary human MAGEA1 amino acid sequence is set forth below (SEQ ID NO: 158; GenBank Accession No: P43355.1, Version 1, incorporated herein by reference):

| | |
|---|---|
| 1 | msleqrslhc kpeealeaqq ealglvcvqa atssssplvl gtleevptag stdppqspqg |
| 61 | asafpttinf trqrqpsegs ssreeegpst scileslfra vitkkvadlv gflllkyrar |
| 121 | epvtkaemle sviknykhcf peifgkases lqlvfgidvk eadptghsyv lvtclglsyd |
| 181 | gllgdnqimp ktgfliivlv miamegghap eeeiweelsv mevydgrehs aygeprkllt |
| 241 | qdlvgekyle yrqvpdsdpa ryeflwgpra laetsyvkvl eyvikvsarv rfffpslrea |
| 301 | alreeeegv |

[0395] An exemplary human MAGEA1 nucleic acid sequence is set forth below (SEQ ID NO: 159; GenBank Accession No: NM_004988.4, Version 4, incorporated herein by reference):

| | |
|---|---|
| 1 | agagagaagc gaggtttcca ttctgaggga cggcgtagag ttcggccgaa ggaacctgac |
| 61 | ccaggctctg tgaggaggca aggttttcag gggacaggcc aacccagagg acaggattcc |
| 121 | ctggaggcca cagaggagca ccaaggagaa gatctgcctg tgggtcttca ttgcccagct |
| 181 | cctgcccaca ctcctgcctg ctgccctgac gagagtcatc atgtctcttg agcagaggag |
| 241 | tctgcactgc aagcctgagg aagcccttga ggcccaacaa gaggccctgg gcctggtgtg |
| 301 | tgtgcaggct gccacctcct cctcctctcc tctggtcctg ggcaccctgg aggaggtgcc |
| 361 | cactgctggg tcaacagatc ctccccagag tcctcaggga gcctccgcct ttcccactac |
| 421 | catcaacttc actcgacaga ggcaacccag tgagggttcc agcagccgtg aagaggaggg |
| 481 | gccaagcacc tcttgtatcc tggagtcctt gttccgagca gtaatcacta agaaggtggc |
| 541 | tgatttggtt ggttttctgc tcctcaaata tcgagccagg gagccagtca caaaggcaga |
| 601 | aatgctggag agtgtcatca aaaattacaa gcactgtttt cctgagatct tcggcaaagc |
| 661 | ctctgagtcc ttgcagctgg tctttggcat tgacgtgaag gaagcagacc ccaccggcca |
| 721 | ctcctatgtc cttgtcacct gcctaggtct ctcctatgat ggcctgctgg gtgataatca |
| 781 | gatcatgccc aagacaggct tcctgataat tgtcctggtc atgattgcaa tggagggcgg |
| 841 | ccatgctcct gaggaggaaa tctgggagga gctgagtgtg atggaggtgt atgatgggag |
| 901 | ggagcacagt gcctatgggg agcccaggaa gctgctcacc caagatttgg tgcaggaaaa |
| 961 | gtacctggag taccggcagg tgccggacag tgatcccgca cgctatgagt tcctgtgggg |
| 1021 | tccaagggcc ctcgctgaaa ccagctatgt gaaagtcctt gagtatgtga tcaaggtcag |
| 1081 | tgcaagagtt cgctttttct tcccatccct gcgtgaagca gctttgagag aggaggaaga |
| 1141 | gggagtctga gcatgagttg cagccaaggc cagtgggagg gggactgggc cagtgcacct |
| 1201 | tccagggccg cgtccagcag cttcccctgc ctcgtgtgac atgaggccca ttcttcactc |
| 1261 | tgaagagagc ggtcagtgtt ctcagtagta ggtttctgtt ctattgggtg acttggagat |
| 1321 | ttatctttgt tctcttttgg aattgttcaa atgttttttt ttaagggatg gttgaatgaa |
| 1381 | cttcagcatc caagtttatg aatgacagca gtcacacagt tctgtgtata tagtttaagg |
| 1441 | gtaagagtct tgtgttttat tcagattggg aaatccattc tattttgtga attgggataa |
| 1501 | taacagcagt ggaataagta cttagaaatg tgaaaaatga gcagtaaaat agatgagata |
| 1561 | aagaactaaa gaaattaaga gatagtcaat tcttgcctta tacctcagtc tattctgtaa |
| 1621 | aatttttaaa gatatatgca tacctggatt tccttggctt ctttgagaat gtaagagaaa |
| 1681 | ttaaatctga ataaagaatt cttcctgtta aaaaaaaaaa aaaaaaaaaa aaaaaaaaaa |
| 1741 | aaaaaaaaaa aaaaa |

[0396] An exemplary human MAGEA11 amino acid sequence is set forth below (SEQ ID NO: 160; GenBank Accession No: P43364.2, Version 2, incorporated herein by reference):

| | |
|---|---|
| 1 | metqfrrggl gcspasikrk kkredsgdfg lqvstmfsed dfqsterapy gpqlqwsqdl |
| 61 | prvqvfreqa nledrsprrt qritggeqvl wgpitqifpt vrpadltrvi mpleqrsqhc |
| 121 | kpeeglqaqe edlglvgaqa lqaeeqeaaf fsstlnvgtl eelpaaesps ppqspqeesf |
| 181 | sptamdaifg slsdegsgsq ekegpstspd lidpesfsqd ilhdkiidlv hlllrkyrvk |
| 241 | glitkaemlg sviknyedyf peifreasvc mqllfgidvk evdptshsyv lvtslnlsyd |
| 301 | giqcneqsmp ksglliivlg vifmegncip eevmwevlsi mgvyagrehf lfgepkrllt |
| 361 | qnwvqekylv yrqvpgtdpa cyeflwgpra haetskmkvl eyianangrd ptsypslyed |
| 421 | alreegegv |

[0397] An exemplary human MAGEA11 nucleic acid sequence is set forth below (SEQ ID NO: 161; GenBank Accession No: AY747607.1, Version 1, incorporated herein by reference):

| | |
|---|---|
| 1 | gagtggcaga gggcagcggg tccaggctcc atgaggaggc aagccttggg aatctgaggg |
| 61 | atggagactc agttccgcag agggggtctg gggtgcagcc ctgccagcat caagaggaag |
| 121 | aagaagaggg aggactcagg agactttgga ctccaggtga gcactatgtt ctcagaggac |
| 181 | gacttccagt caacagaaag agccccatat ggtccacaac tacagtggtc ccaggatctg |
| 241 | ccaagagtcc aggtttttag agaacaggcc aacctggagg acaggagtcc caggagaacc |
| 301 | cagaggatca ctggaggaga acaagtgctg tggggcccca tcacccagat atttcccaca |
| 361 | gttcggcctg ctgacctaac cagagtcatc atgcctcttg agcaaagaag tcagcactgc |
| 421 | aagcctgagg aaggccttca ggcccaagaa gaagacctgg gcctggtggg tgcacaggct |
| 481 | ctccaagctg aggagcagga ggctgccttc ttctcctcta ctctgaatgt gggcactcta |
| 541 | gaggagttgc ctgctgctga gtcaccaagt cctccccaga gtcctcagga agagtccttc |
| 601 | tctcccactg ccatggatgc catctttggg agcctatctg atgagggctc tggcagccaa |
| 661 | gaaaaggagg ggccaagtac ctcgcctgac ctgatagacc ctgagtcctt ttcccaagat |
| 721 | atactacatg acaagataat tgatttggtt catttattgc tccgcaagta tcgagtcaag |
| 781 | gggctgatca caaaggcaga aatgctgggg agtgtcatca aaaattatga ggactacttt |
| 841 | cctgagatat ttagggaagc ctctgtatgc atgcaactgc tctttggcat tgatgtgaag |
| 901 | gaagtggacc ccactagcca ctcctatgtc cttgtcacct ccctcaacct ctcttatgat |
| 961 | ggcatacagt gtaatgagca gagcatgccc aagtctggcc tcctgataat agtcctgggt |
| 1021 | gtaatcttca tggaggggaa ctgcatccct gaagaggtta tgtgggaagt cctgagcatt |
| 1081 | atgggggtgt atgctggaag ggagcacttc ctctttgggg agcccaagag gctccttacc |
| 1141 | caaaattggg tgcaggaaaa gtacctggtg taccggcagg tgcccggcac tgatcctgca |
| 1201 | tgctatgagt tcctgtgggg tccaagggcc cacgctgaga ccagcaagat gaaagttctt |
| 1261 | gagtacatag ccaatgccaa tgggagggat cccacttctt acccatccct gtatgaagat |
| 1321 | gctttgagag aggagggaga gggagtctga gcatgagatg caaccagggc cagcgggcag |
| 1381 | ggaaatgggc caatgcatgc ttcagggcca cacccagcag tttccctgtc ctgtgtgaaa |
| 1441 | tcaggcccat tcttccctct gtgtttgatg agagaagtca gtgttctcag tagtagaagg |
| 1501 | cacagtgaat ggaagggaac acattgtata ctgcctttag gtttctcttc catcgggtga |
| 1561 | cttggagatt tctttttgtt tccctttggt aattttcaaa tattgttcct gtaataaaag |
| 1621 | ttttagttag cttcaacatc taagtgtatg gatgatactg accacacatg ttgttttgct |
| 1681 | tatccatttc aagtgcaagt gtttgccatt ttgtaaaaca ttttgggaaa tcttccatct |
| 1741 | tgctgtgatt tgcaataggt attttcttgg agaatgtaag aacttaacaa taaagctgaa |
| 1801 | ctggtgttgt gaaacagaga aaaaaaaaaa aaaaaaa |

[0398] An exemplary human MAGEA9B amino acid sequence is set forth below (SEQ ID NO: 162; GenBank Accession No: NP_001074259.1, Version 1, incorporated herein by reference):

| | |
|---|---|
| 1 | msleqrsphc kpdedleaqg edlglmgaqe ptgeeeetts ssdskeeevs aagsssppqs |
| 61 | pqggasssis vyytlwsqfd egsssqeeee psssvdpaql efmfqealkl kvaelvhfll |
| 121 | hkyrvkepvt kaemlesvik nykryfpvif gkasefmqvi fgtdvkevdp aghsyilvta |
| 181 | lglscdsmlg dghsmpkaal liivlgvilt kdncapeevi wealsvmgvy vgkehmfyge |
| 241 | prklltqdwv genyleyrqv pgsdpahyef lwgskahaet syekvinylv mlnarepicy |
| 301 | pslyeevlge eqegv |

[0399] An exemplary human MAGEA9B nucleic acid sequence is set forth below (SEQ ID NO: 163; GenBank Accession No: NM_001080790.1, Version 1, incorporated herein by reference):

| | |
|---|---|
| 1 | gtgcgcactg ggggtcagag agaagggaga ggcctccttc tgaggggcgg cttgataccg |
| 61 | gtggaggagc tccaggaagc aggcaggcct tggtctgaga cagtgtcctc aggtcgcaga |
| 121 | gcagaggaga cccaggcagt gtcagcagtg aaggttctcg ggacaggcta accaggagga |
| 181 | caggagcccc aagaggcccc agagcagcac tgacgaagac ctgcctgtgg gtctccatcg |
| 241 | cccagctcct gcccacgctc ctgactgctg ccctgaccag agtcatcatg tctctcgagc |
| 301 | agaggagtcc gcactgcaag cctgatgaag accttgaagc ccaaggagag gacttgggcc |
| 361 | tgatgggtgc acaggaaccc acaggcgagg aggaggagac tacctcctcc tctgacagca |
| 421 | aggaggagga ggtgtctgct gctgggtcat caagtcctcc ccagagtcct cagggaggcg |
| 481 | cttcctcctc catttccgtc tactacactt tatggagcca attcgatgag ggctccagca |
| 541 | gtcaagaaga ggaagagcca agctcctcgg tcgacccagc tcagctggag ttcatgttcc |
| 601 | aagaagcact gaaattgaag gtggctgagt tggttcattt cctgctccac aaatatcgag |
| 661 | tcaaggagcc ggtcacaaag gcagaaatgc tggagagcgt catcaaaaat tacaagcgct |
| 721 | actttcctgt gatcttcggc aaagcctccg agttcatgca ggtgatcttt ggcactgatg |
| 781 | tgaaggaggt ggaccccgcc ggccactcct acatccttgt cactgctctt ggcctctcgt |
| 841 | gcgatagcat gctgggtgat ggtcatagca tgcccaaggc cgccctcctg atcattgtcc |
| 901 | tgggtgtgat cctaaccaaa gacaactgcg cccctgaaga ggttatctgg gaagcgttga |
| 961 | gtgtgatggg ggtgtatgtt gggaaggagc acatgttcta cggggagccc aggaagctgc |
| 1021 | tcacccaaga ttgggtgcag gaaaactacc tggagtaccg gcaggtgccc ggcagtgatc |
| 1081 | ctgcgcacta cgagttcctg tggggttcca aggcccacgc tgaaaccagc tatgagaagg |
| 1141 | tcataaatta tttggtcatg ctcaatgcaa gagagcccat ctgctaccca tccctttatg |
| 1201 | aagaggtttt gggagaggag caagagggag tctgagcacc agccgcagcc ggggccaaag |
| 1261 | tttgtggggt cagggcccca tccagcagct gccctgcccc atgtgacatg aggcccattc |
| 1321 | ttggctctgt gtttgaagag agcaatcagt gttctcagtg gcagtgggtg gaagtgagca |
| 1381 | cactgtatgt catctctggg ttccttgtct attgggtgat ttggagattt atccttgctc |
| 1441 | ccttttggaa ttgttcaaat gttcttttaa tggtcagttt aatgaacttc accatcgaag |
| 1501 | ttaatgaatg acagtagtca cacatattgc tgtttatgtt atttaggagt aagattcttg |
| 1561 | cttttgagtc acatggggaa atccctgtta ttttgtgaat tgggacaaga taacatagca |
| 1621 | gaggaattaa taattttttt gaaacttgaa cttagcagca aaatagagct cataaagaaa |
| 1681 | tagtgaaatg aaaatgtagt taattcttgc cttatacctc tttctctctc ctgtaaaatt |
| 1741 | aaaatatata catgtatacc tggatttgct tggcttcttt gagcatgtaa gagaaataaa |
| 1801 | aattgaaaga ataa |

[0400] An exemplary human TRPM1 amino acid sequence is set forth below (SEQ ID NO: 164; GenBank Accession No: AAH58286.1, Version 1, incorporated herein by reference):

| | |
|---|---|
| 1 | mkdsnrcccg qftnqhippl psatpsknee enkqvetqpe kwsvakhtqs yptdsygvle |
| 61 | fqgggysnka mvrkafrhga tritafiggq spspklqipg llhgcgsifl dislknqeiy |
| 121 | lctwllamrl gnwtpl |

[0401] An exemplary human TRPM1 nucleic acid sequence is set forth below (SEQ ID NO: 165; GenBank Accession No: BC058286.1, Version 1, incorporated herein by reference):

| | |
|---|---|
| 1 | ggggtccctg ccctggccaa ggaggaggct gaaagagcct gagctgtgcc ctctccattc |
| 61 | cactgctgtg gcagggtcag aaatcttgga tagagaaaac cttttgcaaa cgggaatgta |
| 121 | tctttgtaat tcctagcatg aaagactcta acaggtgttg ctgtggccag ttcaccaacc |
| 181 | agcatatccc ccctctgcca agtgcaacac ccagcaaaaa tgaagaggaa aacaaacagg |
| 241 | tggagactca gcctgagaaa tggtctgttg ccaagcacac ccagagctac ccaacagatt |
| 301 | cctatggagt tcttgaattc cagggtggcg gatattccaa taaagccatg gtgagaaagg |
| 361 | cattcagaca tggtgccact aggatcacag ctttcattgg cggccagtct cccagcccca |
| 421 | aactgcagat acctggtctt cttcatggct gtggctcaat cttcctagat atttcattga |
| 481 | aaaaccaaga gatatatctg tgcacatggc ttttagccat gaggcttgga aactggacac |
| 541 | cactgtaaag aacatctagt gtcccgtaaa tccataccaa agctctgaat ccacaaacca |
| 601 | ggctctggcc caaccctgca aacacactcc attgctccat cttcagtaaa ggaagacaaa |
| 661 | ttcatttttc taataactgt ggacctgcag cccccttaga tgtgttgaga gtctttggaa |
| 721 | atattttcct ctgaggtctg tccacagctt ccctgggcct gcgctcagct ggcccgagaa |
| 781 | ggaccaaggt ccctcacatt tgcatgtaaa cagggagtgc cctctgccct tccagtgagc |
| 841 | cctgccagcg tgggggaggc ttcagctctg tgatccgttc cagctcactc tgaattacac |
| 901 | tcctacatgc ccagtcacag actttttgca atttcatttt atttcactgg cccaacatca |
| 961 | ttgttaaaat aaaatttagt tgtgttccaa atgctcaaaa aaaaaaaaaa aaaaaaaaaa |
| 1021 | aaaaa |

[0402] An exemplary human CSAG4 nucleic acid sequence is set forth below (SEQ ID NO: 166; GenBank Accession No: NR_073432.1, Version 1, incorporated herein by reference):

| | |
|---|---|
| 1 | gggaagcagg cgcaggctcc gtgaggaggc aagaggaaag gccaagaact gacaaattaa |
| 61 | taaagggcca tctacaagcc aggaataagg ccatcaccag aagacaaccc cgccagtcct |
| 121 | tgatctggga cttccacatt tcaaaactga aaaaagataa atttctgttg tttcagctac |
| 181 | tcagtcaatg gcattttgtt atggcagcct aagctaagac ataacctcag cctgctggcc |
| 241 | tgccttcact gtcctggggg aggcatggag agaccaggtg gactggagta gactgttgag |
| 301 | agacactggt ctggtgaaga tgtccaggaa accacgagcc tccagcccat tgtccaacaa |
| 361 | ccacccacca acaccaaaga ggttgccaag acaacccgga agggaacagg gacccgtcaa |
| 421 | ggaagttcca ggaacaaaag gctctcccta aaagaccgcc gcttcaaaaa aacctgagga |
| 481 | atggagtggg ccaacactat ccagccactc cgaccagcca aaagaactca atcaaaatga |
| 541 | gacacagtag gaccacaagg gcaaggagac caccaccttc tccagtctct ctttgggcag |
| 601 | ccagtaattc ccgggcaagg ccagaaacct caaggctacc tgaaaagtct ccagaggtct |
| 661 | aaccccagaa aaatagccaa cagggtgtag agtacatttt ataccccaaa gggtataccc |
| 721 | catggtgacg aaaataaaat gaacatgttg taaaaaaaaa aaaaaaaaaa aaaaaa |

[0403] An exemplary human AC093787 (RP11-215P9) nucleic acid sequence is set forth below (SEQ ID NO: 167; GenBank Accession No: AC093787.1, Version 1, incorporated herein by reference):

| | |
|---|---|
| 1 | tagttgcttc actttccctt gtctagaaaa gattgctgta gtaattatta ttaacactct |
| 61 | taataataat ggtaaccagt aataataact gagccttttt acatcccagg gttagtatta |
| 121 | taattggtgc cttatgtatt aattcttctg atcctcacca gaggaagctc acaaaggtaa |
| 181 | ctaactggct aagcctctca taggcagtag gtgatacagc ctgaagaacc cagatggttc |
| 241 | agctcctgaa tccttcttct taccattatg ttctgccacg tctcacatac cagtgggaat |
| 301 | ccacacagca gatgaccctt aactttgttc tgtaaaaatt ccatagtagg taaaataagc |
| 361 | tatcacccaa ggggtttctc tactctccaa tacagaaaat ggacattagc ctagtgatac |
| 421 | caaaatgcta ctgctcttcg tgtgaaatcc tagccagttg aaaccattaa aggggacaaa |
| 481 | tgtcactgag catctactgg atgccagaca ttatttcatg catttcaatg tgatttatct |
| 541 | cacttagtca aaaaaaaata tatatggtaa atttgaagaa tggttaaaga agtgggtgaa |
| 601 | cagccttggc attttctcaa cactataatt tttttggttg tttactttgt tttttcttgt |
| 661 | aattaagtaa taataaaaag ttcaataaca acagctcact tttttgaaga atggttaaag |
| 721 | aagtgggtga gcagccttgg cattttctca acactataat ttttttggtt gtttactttg |
| 781 | ttttttttct tgtaattaag taataataaa aagttcaata acaacagctc actttttttt |
| 841 | tttttttttg agacagagtc tcgctctgtc ccccaggctg gagtgcactg gcgagatctc |
| 901 | agctcactgc aagctccacc ttccaggttc acaccattct cctgcctcag cctcctgagt |
| 961 | agctgggact acaggcatcc gccaccatgc ccggctaatt ttttgtattt tttttagtcg |
| 1021 | agacggggtt tcatcatgtc agccaggatg gtctcgatct cctgacctcg tgatctgccc |
| 1081 | gcctcggcct cccaaagtgc tgggattata ggtgtgagcc accgtgccca gccaacaaca |
| 1141 | gctcactttc aaaatgtatg ttactcttta gaatgtattc aatcactaat ttttgctatg |
| 1201 | tgcgagttgt tcttatagtg gccagagtcc ctcttcaaat aggtgataaa atatcttaaa |
| 1261 | gtatgtgaat attcatatgt ctcaagttca gttaacaaac aaatataatt agattaagcc |
| 1321 | ttgatatttc taatagactt ctctaataaa tgtattttct taatttctac tattattaat |
| 1381 | gctttttatt taaaattgag gatgtgatac ataagaaata aatataacta gagccttcat |
| 1441 | atttctaagt tttctctaat aaatatattt ccttaatttc taccactatt aatgcttatt |
| 1501 | taaaattaag catgtgataa ctatttgttg ccacctcata caaaataaaa taatgtaata |
| 1561 | ttaattatgc ttattgtgca tgtgctttgt gtcgacttac ggtgtaagtt gtctagtagc |
| 1621 | tcagttagcc cccacttgcc aaactatgta gtcataccaa tttttttttc agatggataa |
| 1681 | agggaggcag gagggttttg taaccacaga gttcatcatc agaggtgaac aggaccaaga |
| 1741 | tttgaacctg acagtttttc ttcagagttg gaaatcttaa tctccataca tacttgaggt |
| 1801 | tttcggatcc tcaccaaatt ttcagttatc taacttaaat acggacaatg tgaaggtcac |
| 1861 | aaaattactt tcagtcatct ctaagataaa tctcagagag ataagcaatt tttcagcaga |
| 1921 | tgaaatataa ttaaaacaag agattacgta ccttctggtc ctgttgccaa gagatcactg |
| 1981 | gtttccccca aggcttgatc tattcatgag ggcagacgtt ggaatacttc gaatttctcc |
| 2041 | tcatctaggt aagcttcggg atgcattatg gcaaccagaa taattttatt caagaatagg |
| 2101 | aaaggccagc tagtttagca cacttagaca tgaaatttac tattatcata tttaattcaa |
| 2161 | tcttatttct tttctatttc aatttacaga tagaaattat agagtagttt tataggctga |
| 2221 | cctgtgtaaa ctccttctca taatttttta atacagtcct gaggattcta tacaataatg |
| 2281 | taattgtgtt gcctgccatt caatgagtaa ttggccttca ggtttctctt aatgatggta |
| 2341 | aataagatgt tacgatttcc tttgttttct gtaagatatt taataatgaa tgtctcaatc |
| 2401 | taccacaatg tttaactttg gggaacaaga tctgaaaaaa atatactctt aaaaacttaa |
| 2461 | atgttgaatt attccttcac atgtaatgtc ctgacactga tgtttctacc agcatacagg |
| 2521 | gagtaaatat tcaaaatgat tgcataaatg tatacaaact agaggctagg aactggtaag |
| 2581 | ccttgtccag atgacaagac actctttgct aaaattaaca ttctctctca cctcagaggt |
| 2641 | ttcatcattg ctattgttgt caatattgct gtttattaaa actgtattct gtaaattacc |
| 2701 | agtgagagtg agtggtttta atattacttt agtgtccaca tagaaattct tcagtgatga |
| 2761 | gaagacccaa aagattgctc actgtacagg gactcttggc tagctaaaaa aaaaaaaaaa |
| 2821 | aaaaaaaaaa aaaaaagcta aatatttcca ttgctgagat gtaaacgaag aattcccaaa |
| 2881 | catttgaggt atctgtttaa tgtctaaaat aagaagttga aacctttcac taacaacttg |
| 2941 | tgctgtgaaa cacataagtt taaatgagta attcaacagt tactgtttgg atttacatag |
| 3001 | aaagactttt gccaaagcct gtgctgaaca catatcaaaa caattatgcc tagcatgtac |
| 3061 | acagtgataa gaatgttttc ttttggcatc cactagagga gaaacttaga gcagcaccac |
| 3121 | tttctgccgc tacccttggg tccatgctgc ggtagttact tacctgaatt gtcctcggag |
| 3181 | taactgcatt tccttgtata tgaaatggac ctaaagtaat ggatttgccc attagtgaat |
| 3241 | aatattagaa acaatttcaa ttgtaatgca attgctgttc agttccatgc aatttctgca |
| 3301 | tagaaacaca actgaaagaa aaatgacaac caatcaacca gtaaaacggc aataaatact |
| 3361 | ttttaggtga gaaaacgtca aaagagtgtg gatttggaag tccttccatt gtgctaatta |
| 3421 | tcgatctttt ttctctctct gaacacttgt caacagtcat taggtttata caattttctc |
| 3481 | tttttaatgc atcaaaaaat caccaaatag gaagaagtaa atctgtataa cgggacatct |
| 3541 | aacaattggt tttaaaatac ataacctaca gtctaaaata aagaagaaat atatacatgt |
| 3601 | gaagcttttt tttgactgac tatattataa aatatgctaa aattgtactg caaatgaact |
| 3661 | ctcctcacct cccaaataat aacaaaacat acagtgaaac aaaattgtac aagtttatat |
| 3721 | taaggctctc aaatttaaac taagcataaa aactgagcaa tttatcttgg gattctaaaa |
| 3781 | aataaaaatg aatctaacaa aattcaaatt gatgataccc gacatgttgt cataatataa |
| 3841 | caaagtttac tctctgaaga aatatcaagt tttaaaaata aataggaaca aaaccaagca |
| 3901 | tcatctaaag gccagtttct agttttctca gcaccatggg taacttttgt aagaaatgag |
| 3961 | ataatcctgt agtcccagct acttgggggg ctgaggcagg agaatggcca gaacccggga |
| 4021 | ggcggagctt gcagtgagcg gagatcgcac cactgcattc cggcctgggt gaaagagcga |
| 4081 | gactccgtct caaaaaaaaa agaaatgaga taattagatt taccgcaaat gaaattttga |
| 4141 | tgaagtgcta ttgaagtata atattctatg aaatcccttg ttaccttgaa aggagctaaa |
| 4201 | tgacaactgc ttgattatca tgggacaaag ataactttag gtttttttct tctaaattgt |
| 4261 | ggatagtgac tatttcggta ttttctgtaa tggtattttc tgtaagtgat attacccagc |
| 4321 | ttttaggtcc acatcttagc caaatcactt cctgaaacct gacttacaac aaaaaccttc |
| 4381 | tttgttcttc cttagcctgt gaatagtggc agcatttaaa attaatacca tgcaattacc |
| 4441 | ttctgttcta tgataatctt tcatattttc tcttgttttc tcaaactctt cataactctt |
| 4501 | aggtcaaatt tcatgcacta tatagttccc ttccttttgt atcaccttta tgtagctaag |
| 4561 | attatagtaa gttgttaaca agaatttata gatttatcgg tcaaattatt aaccgttcaa |
| 4621 | caagaagacc aaagccaatg taatattttt aaaagtaggg attaagaaaa ttacctttgg |
| 4681 | tattatcctt aaagagagtt ttagtcctta ttttccaata catacactca actatacctc |
| 4741 | ccgttttgta agaaaaccac ctgcattagg gaacatttct taaattgttg aagtcttaac |
| 4801 | attgatacat ttaactattt acttacaatc tttgggaata ttatagagga tattcactaa |
| 4861 | agataattaa agagattgta ctccacatgt cagatgaatg gctttaaaac cttagtagaa |
| 4921 | ttcaccagga tttttgctta aagtgcaaat ttctcagtta gttccaagtc cagagattct |
| 4981 | gatttaacag gcatagaaca ggacctggga atctgcattt taaataaact caaggtccat |
| 5041 | cttaaatgca ctcagaaata agtgatttta ctacttgaga aatgtaactt gaggagttta |
| 5101 | aaatctgtga aatctgtgat aaaaattaat tatgtggctg ggcatggtgg ctcatgcctg |
| 5161 | taatcccaac actttgggag gccaaggcag gcagatcaca aggtcaggag ttcaagacca |
| 5221 | gcatggccaa tatggtaaaa ccccgtcttt actaaaaata caaaaaaatg taaccaggtg |
| 5281 | tggtggctgg tgccagctac ttgggaggct gaggcaggag aattgcttga accggggagg |
| 5341 | tggaggttgc agtgagccta gattgcacca ctgcactgca gcctgggtga cagagtgaga |
| 5401 | ctccagttca aaaaaaaaaa aaaaattaaa tatgtgcttt ggcactttaa agagaagtaa |
| 5461 | ataaatgatt cgtgtttggc ttctattctg tccatctctg ctaattttct ttctttcttt |
| 5521 | attcaccttg gctggtctgt gtatttacat gtaactttca tgaaaactcc atccatcttc |
| 5581 | atcaatacac ataatacata ccttgcaagg ccctttttag aagtcctatt caaatatttc |
| 5641 | tgagccagat gaatcagtct gtgttagtct gttttcatgc aaataaagac atacttgacg |
| 5701 | ggtcatttat aaagaacaag tgatttagtg gactcacagt ttcacatggc tggggaggcc |
| 5761 | tcacagtttc acatggctgg gaaggcctca caatcatggc agaaagcaaa ggaggagcaa |
| 5821 | aggcatgtct tagatggcag caggcaaaag agcttgtgca ggtgaactcc cattatgaaa |
| 5881 | ccaacaggga cttattcatt accatgagaa cagtatgggg gagaccgccc ccatgattca |
| 5941 | attatctcca cctggccctg cccttgacat attgagatta ttacaattca aggtgagatt |
| 6001 | tgggtgggga cagagccaga ccatatcaca gtcccataat ctcttttgta gtgataaaaa |
| 6061 | tcacaagtct gaaccattca tgatattttc ttatactata atttatgaaa gacttacgga |
| 6121 | agattttttt gtatctcctc caccttcact attgcaatgg attaaatggt tgtttttctc |
| 6181 | cccccaccca aattcatatg tcaaaatcct aacccacaat gtatggtact aggaggtggg |
| 6241 | gtctttggga gcaaattaca tcatgagact ggagcccatg tgaatgagat tagcaccctt |
| 6301 | ataaaaaaga ccccagagaa ctctcttgct ctttttctat tgtgtgagga tataaagaaa |
| 6361 | agacggcagt ctacaagtca gaagagggtc ctcacaagaa ttaatccatg ctggcactct |
| 6421 | aatctcatat ttctgaactc aagatctgtg agaaataaat ttctgttgtt tataaaccca |
| 6481 | tccagtttac aaagtgccta gtctatggta ctttgctctg gcagcacaaa ctaaaacaac |
| 6541 | tatattttta agaaaaaaaa aatgcatgaa catacatcta taaaagtctt caacctgata |
| 6601 | actctgaaat aacttttact ttaatggtat tcatataaga aagaaatgta tgaagccaaa |
| 6661 | ataaatctca aaattaaggg ggaatattac ttaccaaaat gcatgtttgc tttgccaaag |
| 6721 | cctgaaactt ttttcttttt aagcaaattg aaaacctcaa agatttcaat attttttatt |
| 6781 | acttatccca gcaaaatcat tcagaccact tatttttaaa attatatagt cactgattta |
| 6841 | tttcactttt atgcagttag gataggaagt ggaggtcaat tggaaaatat aattatagga |
| 6901 | ataggaccat catgaaatga ttttttaatt tattaccatt cagagcatct atacttgttt |
| 6961 | gtcacacatt cagaagaatg gaagaaagga gggtagagaa tgagtcatat gcattgaaaa |
| 7021 | ttattattca gtttcaaaat gagtgcccaa aactatagac actgtaagac actgaatttg |
| 7081 | aatattttac atttcattct tctattaaaa ttcatttcat tgagaacaaa aagaaaacaa |
| 7141 | gaaaaaataa gaagataagc atcttcagag aaacaactac agcccgaaac catgaactga |
| 7201 | gaagcaaacc ttccaaatac tgttatattt caactaaaac aaggagtgat cagagtgaat |
| 7261 | gctttcacat gtataatcag tacatgttca ggatggtcat tttttccagc tatcattgcc |
| 7321 | actactctgg gagatgtaac tcaaaaacta tttttcttaa aattgttaga ttttatggaa |
| 7381 | taatgtgacc atgatattaa taaaagtagg aaagtcacta tagagtaact cagtgttgtc |
| 7441 | taaccataaa atggaaagaa tttgaagttg taagagaatt caggctgatg tactctattc |
| 7501 | atttcatata ctctgagttc caaacagaat gaagctcaca gaagtggaga ggagcaaaag |
| 7561 | agaaaagcat taaccagcat gtgataatat agagattaga aatgtagatt tagaaaccta |
| 7621 | ggaatctaaa tatgagccac attaccttta gaaaagtgaa tgctgatagg aggagaaaca |
| 7681 | agtgtccagt acttagggag taaggaaatt agtgtgacag tattccatta caaaaacatg |
| 7741 | gatttaaaaa aaggtacaaa ctgcaatgcc acaccgctcc tgccccagag gatcccttag |
| 7801 | ctaatacctg gatctgttct atgaggaatg cagagagaaa aaaatcagta aaatatatat |
| 7861 | gcctggtgtt ctattttcta aatatgaaaa tgaacaaaaa gcataaacaa gatgcagttg |
| 7921 | ctaaaactaa atcacaagta gaattaccaa agtaatcaga gaacaaattg aagttaactt |
| 7981 | aatctcaatt tagaaattga agtgaacaac taaggaatta tataaaaaag aaatacatag |
| 8041 | gcactataca tcagcaatta catccagaaa aatagtgaat atctagaaga aaccacacaa |
| 8101 | aagtaaatta tatgaaaaga caaaggcata ataaaaatcc ttaatatggc attggtaaat |
| 8161 | atagatgcat gacaatggag actcaacctc tgcctacttg atgttttgaa gaataagaaa |
| 8221 | gaacattaat actggaaaca ttacttgttg aaaacttcaa agagataaaa tgacacttga |
| 8281 | atctatagat taaaatagca ttctgttttt tagacaaaaa tatagagata ctgatcatca |
| 8341 | ctaagactga ctttgattca cttactagat ttgaagaata aagcaatagg ataattgtca |
| 8401 | tctgggcagt taaacaagtc tctgagaatt caactgttgc cgataaagaa ttaatgatta |
| 8461 | ccagaattat gcaacttttg taaacgtcta gaaatccaga acaagtatat aaactgtttt |
| 8521 | tattgcatga aaaaaatagg cagcccaaaa ctgtcatttc tgagagaaag aaaacaatat |
| 8581 | atacccttta ttgtgccagc atacttactg aaagtgattt ccagcctcca gcatggtatg |
| 8641 | agacaatccg agagagaata tcatgatttg ctgaatttaa gagcaagata tcaaagttta |
| 8701 | tgtaggccaa ggtgactaga atcatcaagg cagactgaca gagagaagag ggctgcacag |
| 8761 | agagagaact gtggagattt acatagaggt tctctggagt ccttgagtga gaactgaact |
| 8821 | gtgcctacat aaagtaaaac tccatgagat agaaaaatga gtcttcatta gcaatgggcc |
| 8881 | agagaaattc ctggaggtca tatgggcctt agaagaaccc gtatgtgctc cagccagagt |
| 8941 | gagaaactta taatagcaga tagagttctc agaataatca caccttagta gcggggtgaa |
| 9001 | tcagttctag agtcaaggct ctgaagccat tataatcaca tttaaaagca aacaatatca |
| 9061 | ccattgatct cagataactt aactgcattt gaaaacaaag ttcatctctc tttaaagaaa |
| 9121 | taaaacaaaa tccagatcct aacaatgtag aattcagaat ttcccttaga cattaaaaaa |
| 9181 | ataacagaaa tgcatataaa caaaaaaatt gatccaaaac aagacaaaaa ttaatcaaaa |
| 9241 | cagaccaaga aaagatagaa attatgggat tagaaaatat taagcagctt aacaacacac |
| 9301 | ataattgaaa tcccaggaaa tgggggcagg gcaaaaacta cttgtaaagg tagtggttga |
| 9361 | gatattttta aaacttggta aaactataaa ccaacaggta aaagaagtgc agtggactca |
| 9421 | aagcaaaatg aataaaagga ttaagttgaa gaaagttgtt tttaaaaaga aaacttaaaa |
| 9481 | acagttggag aaaaagagat gtattactga caatggaacc aatgtaataa ctacttttta |
| 9541 | tgataagcat gtatatcaga agacagtagc gcaacattct attacttaaa gcaagagaaa |
| 9601 | caagtcaacc tggaaattca ttcaagtgaa aattctaaaa aaatcaagaa atttacaaaa |
| 9661 | atgaaagcaa ataaagctat tttgacaata agtagctgat agattttatc aacaacatac |
| 9721 | tgggactgaa agaaatggta gacaaaaaga aagtaacagg atgataatgt acttttttta |
| 9781 | ttattatact ttaagtttta gggtacatgt gcacaacgtg caagtttgtt acatatgtat |
| 9841 | atatgtgcca tgttggtgtg ctgcacccat taactcgtca tttaacatta ggtatatctc |
| 9901 | ctaatgctat ccctcccccc tccccccacc ccacaacagg ccttggtgtg tgatgttccc |
| 9961 | cttcctgtgt tctcattgtt caattcccac ctatgagtga gaacatgcgg tgtttgtttt |
| 10021 | tttgtccctg cgatagtttg ctgagaatga tggtttccag cttcatccat gtccctataa |
| 10081 | aggacatgaa ctcatcgttt tttatggctg catagtattc catggtgtct atgtgccaca |
| 10141 | ttttcttaat ccagtctatc attgttggat atggggtaaa ggattcctat ttaataaatg |
| 10201 | gtgctgggat aatttacatt tttaaaaaga aatgattcat gttagaaata atacataggg |
| 10261 | cagtgcatgg tggctcacgc ctgtaatttc agcactttgg gaggttgagg tgggcggatc |
| 10321 | acaaggtcag gagttggaga ccagcctgac caacatggtc aaaccctgtc tctactaaaa |
| 10381 | atacaaaaat tagctgggtg tggtggcacg tgcctctaat cccacctact caggaggctg |
| 10441 | aggcaggaga gtctctcgaa cccacgaagt ggaggttaca gtgagccatg attgcaccac |
| 10501 | tgcactccag cccgggcaac agagcaagac tccatctcaa aaaaaaaaaa aaaaaaaaaa |
| 10561 | aggaaaaaga aacaatacat acaaaagaca ttttttcatg ttttaagtaa tgttaaaggt |
| 10621 | aatggattat ttaaaaccaa aataataatt atttctgtgg tattcaaaat atttataaag |
| 10681 | aaaggaggaa aaccctatga cagtagggca aagaactgta gagagaaaat ggatagacag |
| 10741 | ttataatatt tgttttttta tttgaacatt tattttaaat ttatggaaca catgtacagg |
| 10801 | tttgttacat ggatatattg cgtgatgctg aggttggtgg tacggttaag cccgtcgccc |
| 10861 | aggtactgag catagtacct aacagatagt ttttcaaccc cggtctccct ccctcccttc |
| 10921 | ctctccctct agcagtgtcc agtttctatt gttgccgttt tcatatccat gagtaccctg |
| 10981 | tgtttaactc ccatttacac gtgagaacac gtggtatttg attttctgtt tctgcattaa |
| 11041 | ttcacttaag ataatggctg caagttgcat ccatgttgct gcaaatagat ggttttgttc |
| 11101 | tttattatgg ctgtgtagta ttccatagtg tatatgtacc atattctctt tatccaatcc |
| 11161 | actgctgatg ggcacttagg ttgattccat atctttgcta ttgggaatag tgctacaatg |
| 11221 | aacatacaag tgcatgtgtc tttttggtat attttcttat ggatatataa ccagaaatgg |
| 11281 | gattattaag tcaaatggta gttctgtttt aagctctttg agaaatctcc aaactacttt |
| 11341 | ccccatgggc tgaactaatt tacattccca ccaacagtgt ataaacattc cccttcttct |
| 11401 | atagccttgg caggaacttt tcaataaaat atattattaa acatttttgg agcttttatt |
| 11461 | aatagccatt ctggctagtg tgagatgata tctcattttg gttttgattt acatttctct |
| 11521 | gagattagtg attacgagca tttttttcat gtttgttagc cacttgtgtg ccttcttttg |
| 11581 | agaagtatct gttcatggtt ttgctcattt ttaaaattat ttgttttttg cttgcttaat |
| 11641 | tatttaagtt ccttatagat tccagataag agacttttat tgaacacgtt gtttgtgaat |
| 11701 | attttcgccc atgctgtggg gtgtttgctt atgctgttga tagtttcttt tactgtgcag |
| 11761 | aagctcttta gttgaattag gtcccacttg tcaatttttg ttttgttgaa attgctttcg |
| 11821 | aggacttagt cataaattct ttcccaaggc tgattttcag aatggtgttt cctagcatta |
| 11881 | cttctaggat tcttatagtt tgaggtctta cattgcagga ttataggttg ctgggtttta |
| 11941 | gtatcatggt aatgctggct tcagaattgc aatattttaa aactatatag caggtattat |
| 12001 | aaatattatt tgaaggttga gtgttttaag ttaaaaaaaa tgtacagatg gtactcttta |
| 12061 | tgcacatcag tgcggggcct tagtaaccac tgtgcaagtt gaaactgggc aaagttatct |
| 12121 | taataattac tggaaaaaca taaacttgtt cctgcaatca ttaaaaacac ttgtcagtca |
| 12181 | ggtgcagtgg ctcgcactgg taattccagc actttgggag gccaaggtgg gcagatcact |
| 12241 | tgagcccagg agtttgagac cagtttgggc aacatgacag aaccctgtct ctacaaaaac |
| 12301 | tacaacaaat tagccaggag tggtgatacg tacctatagt cccagctatc caggaagctg |
| 12361 | aggtgcgagg atcacctcag cctggtggtc gaggctacag tgagcctttt tgataccact |
| 12421 | gcactccagc ctggacaaca gagtgaggtc ttgtctctaa ataaaagaat aaataaataa |
| 12481 | acacatttgt caaaatatta aaaatgtctt actgttggtt atatatgcat agaaaagtaa |
| 12541 | aaaccaaaaa acaaccctaa aactagtatt tacatagtac actataattt aaaacattga |
| 12601 | taattaaaat acatgtttta tatatttctt tgaaatgtat tcagattagt ttgtacagta |
| 12661 | tttgtacaac ttctcatcat gtgactctca atatttttta tgctttggtg aattgccata |
| 12721 | cttctttata aatttgatta tttgtccaac attttattgt ttgtgcgttc attgtcttta |
| 12781 | aacatcttgg agagtttctt caatgtaatt ttttttctca gcatcacatc ttctgggaaa |
| 12841 | actttcgtct tttccctgca atcagcttct tcatttaagt tgtaaatatg tattccataa |
| 12901 | gttcccctga ctgcacatat gaaatctctt ggatggtagt tgtgtcagca ttctcgcaat |
| 12961 | taactatttc ttctataaat ccatcaagat ccgatctgaa ttcactttcg gtgttgacac |
| 13021 | tttcatttat ttgccacact ttcatttttg ttggctgatt ttctgtcgtt tatcaatttt |
| 13081 | tgtgtaatgt cacgtcttta tcactgaaag acaaagaagc aacactactg tatgctttcc |
| 13141 | tatctctgta tgaatacaaa acagatacat agtaattgat tattgataga tattgagaaa |
| 13201 | agtgacatga ctaatcatgg atcttgatgc aaatctgaca tttacctaat agttttatgg |
| 13261 | actgaagagt taacagaaaa aaattgtact tcaagccatt agtcccaatt aatacactgc |
| 13321 | tgtacctaca ctgttttgtt ttggggcttg tgctatgtaa ctaaagcatg ataactaaag |
| 13381 | cctttgcata tcaaaactaa ggaaaacaag aactgtctat tttatgagcc ctatatcaat |
| 13441 | cattaaaatt aaaacaatgg aatggttaaa agctaatagt ggagataaaa gcggatctta |
| 13501 | aaaactaaat tttcaattca aaagaaggca gaaaaagggg gaaaatgaac aaaaatgatg |
| 13561 | agacatttag aaaacatata gcaagagagt agttatacac ccaatcatat tgataattgc |
| 13621 | attaaatata aattgacaaa atattcttat taaaaggcag agatcataag acaggattaa |
| 13681 | aaaccctgac tcaactatat gctctttata agaaacttac ctgaaccaaa aaaaagaaaa |
| 13741 | acaaacaaac caaaacccac taaaactgtg aagagcaaag taggcatcag aacaggaaat |
| 13801 | atcactgggg atgaagaata acatttcata atgacaaagg ggaaaataca ccaagaagac |
| 13861 | atgtaaataa taaatatgta tgcacacaat agcattactt caaaatacat aatataaaac |
| 13921 | ctattaaaac tgaaaggtaa aatagtaaaa ccacagtcat ccatggggat ttcaacagtc |
| 13981 | tcctgccaga aatttttaaa atttgttaaa caaaaaattg gtaagggtag agaggatctt |
| 14041 | aaaaatacaa ttagccaact tgatctaact gaatctttta gaataatcta aggatgaggg |
| 14101 | atgaggtagc agagaaagaa aaggcagaca tcaatgtgac attactgttt caaggctatg |
| 14161 | agaatacacc aataattgtg tgtgtgtgtg tgtgtgtgtg tgtgtgtgtg tgcagatggt |
| 14221 | aagctcaatc ttaaaaatgt tgagttttaa ctgaaaattc attattagga aagataagag |
| 14281 | gagatgatat ctagtgagag gctgtatgac tgaactctaa gagaaaggtc acagcagaaa |
| 14341 | ttgtgtacct gacagctcta gaaggaggtc agtcaaaagt aagtcagtga tgaattctct |
| 14401 | ggtgtaaaag cagaggaatg aggattagat ttaaaacaca tggaagcaga gtgacttatg |
| 14461 | ataaaaacat gagcttgaaa atcctgcaga gagggcttta aatcctgggt atgatatcct |
| 14521 | gcttgtgtag gcaatagtga taaaaacaca acaacaaaga gaggtaaaga gcactttcct |
| 14581 | ttgatataag taaagggcac gacttattgc acatatatat ataggtattc aactgagatt |
| 14641 | caacatgttt ctctcattga aacagcaagc tctccaggcc ttcatgttcc cagtgaggta |
| 14701 | ggtacccttc tgatgattat actcaccctc cctcattgca aagctcccgt tgttattgtc |
| 14761 | ttggctctgg attccctcaa aaatagacta tgaaacaaat atctggggtc agatacttta |
| 14821 | atcagaaatt gagtgagaaa gcacagaagt ggagaaaatg aaacagaaca cgaagccagt |
| 14881 | gtgaatgagt agttactgct atgtgctcag taatgacgga ggtatggaga ttgtctcaaa |
| 14941 | ataactttac aaagagatgg ggatgctgga atccccatct cttattgctt aaggattacc |
| 15001 | ttagaatcat taactctcca cccctaactc cttctttgtt cctatgtgtg gttgagaagc |
| 15061 | actggttagc ctcaagaagc ttgcaggcag gtccacaaat cagaaagaca ggcatgatgt |
| 15121 | ggggagctct cagttagctg gaaacaggtg aatttcaggt gaacacattg agtccaggac |
| 15181 | atagaagaca agtcatcaac aatatctgct atagccagtt ttctttttct ataacacata |
| 15241 | tactttttat tgggggtccc caagtccccc tttggtttaa tgattcacat aactcaagaa |
| 15301 | agctgatttt ttttgtggtt atagtttcta acagtgaaag aaaccagatt aaaataatca |
| 15361 | gaagcataaa agcacataaa gttgagtcca ggacaaacca gatatgagct tacaggtgtc |
| 15421 | ctttcatagt ggggacttca cactgactaa ttttctttac aatcatgtga gacaacatgt |
| 15481 | gtgaacttgt tgccaactag ggaagctcag tcagtcttga gtccagggtt tttattagga |
| 15541 | ttccaccaca tatgcatcga gcatcctgtg actgaactta gctacttagt tcccaacctc |
| 15601 | cctatgccct gagaggtcat attaatatgg cattacacaa agtcataggc atacagaaac |
| 15661 | aggtgctcac aagaaataac gttgttagca tcagctattt ggtatgacct acgttttcaa |
| 15721 | gtatacaaag actctcatca ggcagcatat accaagggct cataggttgt catctcccag |
| 15781 | gaggttgtca agggccagtg ctgaagacct ttggaatgcg caaggttttg gaaagccatg |
| 15841 | tctgcagaat taaccattac acaccttcca agaatttttt ttctctttaa aaatgttttt |
| 15901 | tgatctttga caatgtacca accaagactg agtaattagt aacagcagtg tactcctgag |
| 15961 | tacttgcacc tgcaaggaga aaaaggacag atgcacttac ataggacaga tgcaaataga |
| 16021 | caccactatg acaagtaaag ctggaataat caataaattc ctaaagacaa agtggggctg |
| 16081 | gtcagattgg gagaccgctg acagctgcag aagttgggaa agatccatca tcttgaaaac |
| 16141 | tttttcccca caaacccact gcgatctctc aagcaattgg taaggaatcc aagagagtct |
| 16201 | gtatatgaca cagatcaggg agagcagaac acttgggagg tgaccaggtc ttgggggctg |
| 16261 | agcccttatg aatgggatta gtgcctttat aaaagaagct caatggagtt cttgtgtgcc |
| 16321 | ttccactatg tgaggacata gaaagaaggc accatctatg aaccaagaaa tgggctctca |
| 16381 | tcaacactga atttgtgagc atctttacct gagatctttc agcctcaaga agtgtgaaaa |
| 16441 | aagaaatatc tgttgctttt tagtcacccg gtttatgtta ttttgttata agagtccaaa |
| 16501 | tagaccaaga tattccattc cacttaatat gtaggggaag acaacaaaaa ctgccacact |
| 16561 | tagaatactc ctgatactgg aagtatgaaa acaggaaaaa caaaacaaaa ctgctcttga |
| 16621 | aggtgaagga ggaatatcac tgagctcacc aacacagcca ggaaaagaac agaagtgtga |
| 16681 | gaaggctaca ttcctgagac cctgagaaaa agtacctgca taagactgag atgaaattac |
| 16741 | ctaccctagt tataattgaa atcccaaaaa gaggaaaaaa taatggagca aaagaaatat |
| 16801 | ttttcaaaat aactgccaaa aatattctaa aagaagtgac agaaaatcaa acttcagata |
| 16861 | taggaaactc agagaatgtc aaatagaaca aaaataaata agaaatacat cttgaaaaat |
| 16921 | ctttaagaaa tcaactctaa attttatatc ttgctccaaa tatatagaga tataaatagg |
| 16981 | ttagcatgaa gatatggaga aagccatatc atggaaacac taaaataaag ctgtggaagg |
| 17041 | acattgatat tagacacaac aaagttcaga acaagaaata gtatcagaaa tgagagataa |
| 17101 | tagataatat aataattctc aagatgtgaa catcctacta attagggtat gcagctaaca |
| 17161 | acagaacctc caaatacatg aggtaaaaca ggaaagaaat caaaggtgaa ctagaaaaat |
| 17221 | ccaaaattat atttgcagac ttcaacactt ttgtcttagt aatggacaga ctaggcacaa |
| 17281 | actcagtaat cctatggaag ataagaacaa caatatcacc aacaagacac gcaatcttca |
| 17341 | atggcagaca cgctttcaag tgaaaaaaaa aacagtatgg catattttct aacaaaccca |
| 17401 | gaatttctaa tatttgcggt cttccttcca tcttcctttc tcttctcttc ttcttttcct |
| 17461 | ttcttttcct tttttctcct tccttcccct tattcttcct tccctcctcc ctcccttttt |
| 17521 | ttccttcttt tcttattctt tctttccttt tttcctccct tcctccctcc ttttcttcct |
| 17581 | ccctcccttc ctttttcctt ccttcctccc tattttgttt gccttcctcc cttttaccat |
| 17641 | tctctcttcc tttccttcct ccttccttcc tcactttttc tctttctttc ttgagttctt |
| 17701 | gctttctttt ttctcccttc ctccctccct tctctcattt cctccttttc tttcttcttt |
| 17761 | ctttccttct tttttctttc tctttacaac tcatattatt taaaaaaaat taagacaggc |
| 17821 | agaaaaataa agaacacttt aatctgcagg taaatagatt atgtctgctg tagacaaaat |
| 17881 | aatggcctcc caaaaatgtt catgtcctaa ttcccggagt ctaacataca aatatgttat |
| 17941 | gttgcatggc agtgggaaat tagatttcaa gtgaaattaa ggttccaaag gcagcggggg |
| 18001 | caaaaagcct aggcggaggg ggcaaaaagc cgcggcggcg ggggcaaaaa ggagcggggg |
| 18061 | caaaaacccc acaaaaaccc gcggcgacgg ggggaaaaaa ccgcggcggc aaaaagcctc |
| 18121 | agcggcagga gcaaaaagcc gccgcagtgg ggataaaaag ctgcggtgga aaaaacccgt |
| 18181 | ggcggcaggg gcaaaaagcc gtggcttcgg gggcaaaaag ccacagcagc aaaaaccctc |
| 18241 | agcggcgggg gcaaaaagct gtaaaaagcc gcggcggcgg gggcaaaaaa ccgcggcgcc |
| 18301 | aagggcaaaa agccgcggtg acggggcaaa atgccgcggt ggcgggggca aaaagccgcg |
| 18361 | gcgggaaaaa accgcagcgg cgggggcaaa aagctgccgc agcggtgacg aaaagccaca |
| 18421 | ggggcggggg caaaaagccg caaaaagccc cgacggcggg tcaaagagcc gcaaaaagcc |
| 18481 | ccagcgtcgg gggcaaaaag ccgcggctgc cggggcaaaa agcagcggag gcaaaaaccc |
| 18541 | gcggcggtgg ctgcaaaaag cagcggcggc aaaaagccgg ggcggcgggg gcaaaatagt |
| 18601 | ggaaatgggg tagaaggcca gcacagcttg gcattcctgg actgtgatgt ggaaggaaaa |
| 18661 | gtgcagcgca agacaaagat gtaagtaggc ttgactcagt gcagctaaga actcagatgt |
| 18721 | tatcttgatg ttaactatca gctgattttt tgtattttag tagagaaggg gttttaccac |
| 18781 | attggccagg attgtctgga tctcctgagc tcatgatcca cacacctcag cctcccaaag |
| 18841 | tgatgggatt agaggcatga gccacaaagt gctcaaaaaa tctattaatt aaaaaagtgt |
| 18901 | atgtagccgt cttcaatcta ccatgtccat tagcagataa atactacaag caaaataaca |
| 18961 | acaatgaaat aaacatagac ttagagtaga tactctgatt taataaaaat ttgaaagtag |
| 19021 | accaaattac gattaaaaaa actctgttac tattgaggat gagggttagt gtttggaaag |
| 19081 | gggcaggaga agtatcacta tttttagtaa tgttctattt tcatacatgg ctataagcaa |
| 19141 | atatatgtgt ttcattaatc aaggtatcca tatttaatca ttgtactttt ctgcatgtat |
| 19201 | gatatatgtc aataaaatgt cttaaattat atacagcaaa aatagacaaa accacaagaa |
| 19261 | gacatacatg aatgttaaac ctagagagaa atttgaatat aagtaagtct ctgaatgact |
| 19321 | gctagaacaa accaaaaaat aatcaggatg gagaggtttg gaacagcatg attagcaaaa |
| 19381 | ttgacatatc tgtcttttaa tataggcaga aacatagatt aaaaaaggac ttgtctcaga |
| 19441 | gtatgatttc tgaaaatagt ggaatcaagt ttgaatctag taagtacata taaataaatg |
| 19501 | tcttaaaact cttatgttag ctaattaaga aattattgta atagatatta gaaaatattt |
| 19561 | taatacattg agtggatttc acacgctaag gaaatgatct tacttgcatt tgatagttca |
| 19621 | attacataca tatataccta taggtagttt aaaatatttc taataacctt atatactttt |
| 19681 | aaaaagcatt gatatctgtt tgcactatct ggtctataga atacacatac caaacatgat |
| 19741 | tatagctctt ctgctataaa cttcaaatgt ctaattaata caaaaatcta gaatgagaag |
| 19801 | agttctttgc aatttttttt tttttttttt ttttaccaaa tagaatatag gaaggatagc |
| 19861 | tgcaaatata cctgacacac ttatctgtga gtatggtggt agccttttta ttttattttt |
| 19921 | gagagagggt ctcaatttgt cacccaagat ggagtgcagt catgtgatta gagctcactg |
| 19981 | aagcctttac atactgtgct caagcgattc tcccacctca gcctcctgag tagcagggac |
| 20041 | tgcaggtgca tgacaccata ctagctaatt tttgtaaaga tggggtttca ccatgttgcc |
| 20101 | ctggctgatc tccaactcct ggactcaaga gatctggcca ccttggcctc ccaaagtgct |
| 20161 | gggattatag ttttgaggca ccgcgatcag cccagcctta aaaaaggctg actagagatc |
| 20221 | tttatctatg tatatctata tctatctata aaataaacgt gtttattata taaaaatata |
| 20281 | tattattaat attatataaa aatttttttt caaggtagaa atatataaag agggtgcatg |
| 20341 | tagagcctgg gtcattgtgt agtgaagctc aaggcctctg aagaaatgcc ccttgcctct |
| 20401 | tttgtctggg ctagaatcca agaagggaaa gcagcagatg cactggttcc caggttcttg |
| 20461 | gcatcctaca gagagaaaca tgtttgagct aggatagcgt taaacaccct tcttctcact |
| 20521 | ctcctgtttt atgtagtgag cagagactag cttcatgaga acagactgtg acagtcaagg |
| 20581 | ctgtctgtta ttttgtgcag cattaattga gaaattctag cacctgaaga cctctgggcc |
| 20641 | atttgagggt aggtgcaggg aaggaaaggg aagtttgcat ccctcctgct gtggagagaa |
| 20701 | cccgtgggaa gcacagacct tgtcctaact aaaggcagac ccccttgcta accagcttct |
| 20761 | catcagccaa ccctgggtga gtttccatgt ctatttacta aataatcctt attgcttttc |
| 20821 | ttcatagggg caaagtatgg tttacaggga atattgttcc tttgaacacc cattgtgcaa |
| 20881 | actccttcct gttgtgggaa aacaggcttc catatgtgtc tttttgggaa acacattggc |
| 20941 | aatttctatg tttttactgc atctatttct tggatatggg aactgaatag tgcccatcaa |
| 21001 | aggctcacct gatgttggat attgatctga gagcacggaa ggacagaatt ctttctttgt |
| 21061 | tcctgggcag ccgtggttga gggatcattt tgtggcagct acagtggcaa tgatggaggc |
| 21121 | agaacggagg gctcagtacc aagacaagga gagacttggc ctcacaatgg cagcattgca |
| 21181 | ggggtgcgtt ctacagagca tttgctcaca tggttttggg cattgtctct aactacattg |
| 21241 | cttccccaat aggttgaccc attctaaata actccttttc tctttaaaac agaaaacttc |
| 21301 | atttgtatga cttgcaattg taaatgacac gaattggcca gttatcattc aaattccctg |
| 21361 | ttacttaatc ctgccttttt ctaacgtatg caactttccc ctaaaaaact ggacacttcg |
| 21421 | ttgcttattc attgtcttta cacattttaa aatgttgctt tatgccccca atccctaact |
| 21481 | acattttcga tgttttgcaa gtggagtcca tgtgttcttg atttacatga agctcaaaat |
| 21541 | aatggttata gtaactagta cttcataatt aagcaaaaag ctcttattga aaaatgacag |
| 21601 | aactatacat agagatgaca acatggagag atatttcctg agatcacaaa gttatggtat |
| 21661 | ggcagaacta gaaagttgag tagagactct gttcccaatc attatttcta ccaccagctt |
| 21721 | tctattttga tgttaatagt gttcttatgt gggaaaccct acatatttgc cagtgtttag |
| 21781 | ttcattgaca aatataaaga acttcaagaa cactctaatc ttttaaaaat aaaatatcta |
| 21841 | taattggcca tatgaaaaaa attggtactt gacatatact gagatcgttt tattttgtgc |
| 21901 | tagacaaatg aagtcataga acagaatgtg ctttaaatat tatgaatagt gcttgcgtgt |
| 21961 | gtgtgtgtgt gtgtgtgtgt gtgtgtgttt atagatgcat attaggctgc tgaaaagttt |
| 22021 | gactattctt tccaggagag agactgccaa cttttgaacc taattagtac aagtatattg |
| 22081 | cttcttcata tttttattaa ggcaaagaga gtctagttaa aaataattca acttattgtg |
| 22141 | gaaatgctat aaattgctgt gaagtgagtt gctggctatg gcttgtcaga gcgaatatat |
| 22201 | tgtacaaatc ttaggggaga attagtgctt atgcattaaa atcaaatcat cttgcagcac |
| 22261 | actgagaaaa aggttagatt tttaaaataa tttcagagtc atgaaaagag caaatatgct |
| 22321 | caacaaagag cctagcaacc ctcaatgacc aattcccctt ttatatagtt tggtatctga |
| 22381 | attagaatcc cagaatctac aaattcctct gggtgtgggt gctgcatttt gaggatttta |
| 22441 | taacactgcc atcaccaagc tctcttttga tattcaattt aaggagataa tttacgggca |
| 22501 | accagagagc atacaccaaa gtaggtatct atctagatag acagatacat ctccatatca |
| 22561 | ttgacaggat actttctggc cgagcgtgag tacaacctat gggtgtggtt ggagagaaca |
| 22621 | tgtgttccac ctgaatggca gatcaagatt attccttctc atctgctgca atggctcaat |
| 22681 | gtgttaagga gaggagtgag acagcaagaa ctgcattcat tcagtcatac agaccaaaag |
| 22741 | gaggaatgtc gcccagccct ctaaactgac ccagaaccca gctcatgtct caactgctac |
| 22801 | ctctactact tagaaagaag taactccgct aaagcagggt tctggacaaa tatattttta |
| 22861 | ttgatcatat acaaatagat gaagatggac ttggatgtta agaaaaataa tactatacaa |
| 22921 | aatcaagagt agacagtcac ccctagactt aaattaagag tgtgtacatt agataattta |
| 22981 | atccaatgta tcaggtaaaa acttgaacaa acgttttggc ctcttccata aaattcaggg |
| 23041 | aagcatgtcc tccacaaaac agaatcaaaa tataaatgaa agactggctt aagatgaaag |
| 23101 | gaaaccttat aaatgaaaag aagccagatg agaggcactt aactgagaat gaaaaaaaac |
| 23161 | tgagtggaca aaataattat gagaagatga atcttcaaat cagaaagagg gaaaaaagct |
| 23221 | catttgatac tatgggaact caaaagagag tgaacacaaa tgtgaaaatt ccaagagtac |
| 23281 | agaaaagtag cataactaaa ttaagagcat gagaaaatgt atacaattct gagtaataag |
| 23341 | aacagaaatc aaaagttagt attgtatgtt ttagtagagc aacactgaag acgaatgaaa |
| 23401 | acaagaaata atattaaata tgaacatatg gagaacagaa caatattttt aaaattttta |
| 23461 | gtttctaagt ttacctgaaa ttttaatttt ggtttcttat gtaataccag agttattagg |
| 23521 | aagatattag ctaataacac tattttcagt ggtattttaa gtatttgtcc tagaaaaatt |
| 23581 | tctatttttt aaaaatgtat atttaaaaat acattaaatg tgtatataca tcaatcatat |
| 23641 | gtatcgattt ctgttttttt tgaattgcaa atgaaatttg tatttttgtg ttcctggaat |
| 23701 | aaaataaact tgaatggatt gtgatatatt attcatgctg taattcaatg tatttgaatt |
| 23761 | ctttaagaat gttacattta tagttaacag atattgacct ataaattttc tttcatataa |
| 23821 | taatgctgtg agacaatata agaagaatta aaatttaaat tcatgtattc ctactttttc |
| 23881 | ctctgttctc taactgtaat atattttaat tacagatgga ggaacagata gatgttagat |
| 23941 | aaataggtat ataatagatc atccaaaatt cttattgttt tatgtagtca gtatttacct |
| 24001 | ctgtttttct acatgtttat ccttccaatt tagttcatta ctttctgcac ctttgatgtc |
| 24061 | atatacataa acaggaaata acacatggtg gccgggatgt agagagagcc acaggacttg |
| 24121 | tgaatacaat ccacaggcaa ggatgtggcg attccttttg cagtattgga gggaatgcca |
| 24181 | aacgctatgt ttgctgtgga aaagagtatg gtagttcctc aaaacatcaa aatggtattg |
| 24241 | ccatatgatt cagcagcgcc acatctcagg atagcaaaag aattgaaagc agagtcttga |
| 24301 | aaaaatattt gcacatccat gcttgcagca gcgttattgg caatagctaa aacgtagaag |
| 24361 | aaattgaagt gtccaacaac agatgaatgg ataagcacaa tatgatatat acacacaatg |
| 24421 | gaatattatt cagccttaaa catgagggaa atattctgac atatgttgca acttggatga |
| 24481 | aacttgagga tattatgcca agtgaaataa gttagtcagt gaaggacaaa tacagtataa |
| 24541 | ttccatttgt attaaagtgg acagaatcat agagatagta caatgatggt tgccagaagc |
| 24601 | tgtggggagg aagaaatggg gaagtattgt ttaatgggta tagagtttca gttctacaag |
| 24661 | atgaaatgag ttatggagat ggatggtagg gatggctgca caatgttatg actatattta |
| 24721 | gtaccactga actgtacact taaaatcgtt aacagagtac attttatttt atgtgtattt |
| 24781 | taccacaata aaaaaataaa ataccttagg aacattttcc tgaaagagtc cacataaaat |
| 24841 | tcattttaat gcatgtgttt atgcatagct ttctattttt ctcttttcta tttatattcc |
| 24901 | aaattagaat ataatgctaa tcaagcatag tggctgtgtt tcttgcttcg tctagtctgc |
| 24961 | aggtagcata caaatgtaat aaactactta ttcatgtcac atctatttat tttctgcctt |
| 25021 | ataccaagct tgtgggattc tcttaaatac aacattttta tacttacacc taggcaatac |
| 25081 | ccattagcat cgccttccta aatcagggga aattgagcct ctgtaaggtg gagtaactta |
| 25141 | ctaagataca aaactcagca ttaaagtctg tatacttcaa tatcctgccc tcttctcatt |
| 25201 | tgtctttact gccttttatg tatgtgttag atgttcaata aattctcttt tttaaactga |
| 25261 | atttaagccg tggagcagtg ttttgttgaa caataaatat gatataggac actcttcctc |
| 25321 | cctttcattt atgatccagt tcatgaaaaa gagaaattct ttcattgtgc tagaagctta |
| 25381 | aaataatgaa aatgccactt tctacattaa acagaaactg aagggaatca aggtgaattg |
| 25441 | cacgagacat agaaaacaag tgggaaagaa atctagtata atttgccctt tttgtacctt |
| 25501 | tattatttgg cgtttgagta aatgtttccc ccaaatatct tcccatctta attcatgtct |
| 25561 | atgaagtaga catttatgtc tcaccttgtc aagaagggca aactctaaca taaacatttc |
| 25621 | ccaaaaatgc tttctgctaa aacgtaagct cagtctggct agaaatgaag ctcacttcat |
| 25681 | aaagattaat tggtagctaa tctttgcatg ctgttctctg aacctgagtg aaagctgtcc |
| 25741 | atcaggcata cagggaatga cggaaaaggt gacaacagaa gatgaatgct atgtcactaa |
| 25801 | ccttcaaaga tgacctgcct tttctttcaa attcttgata tcttaagact tcattatttc |
| 25861 | atctctcttt gcccttggtt caacattgtg ctataccaaa actcatgtaa aacaatgatc |
| 25921 | taatgtaata aaaatggcat ttttctttca tgtagatgca agctaactgg catttttaca |
| 25981 | atcaacgtat ttcctttgtc aatttttcat tctgtattgg aagtaattga taggtatttc |
| 26041 | tgaagggatg aaggtgtttc tgtgttcatt gtgatccaaa ctatttttag acctaggggc |
| 26101 | atttgtaaaa caatttgtgc cagctgacca aggaccactg tggcagaaag cagcaaactt |
| 26161 | gcataagatg tcactgcctc ataagttggc tttgaaaact aggggcttac tctatagtct |
| 26221 | tatgaatcaa agacattgat agatgtagta taagattaca atcatatttt ccttttgaca |
| 26281 | gtcacattat aaagcatgat gtattgcaat taatctcaat tagctgatca caattaaaat |
| 26341 | taatgtttat tattgctgat aaacaatcat gaatctcctg ttctcaaatg tgcaagtaat |
| 26401 | tcttgtaatt ttaatacaaa tttgcatatt attactaatt gatttaatct cattggattt |
| 26461 | ggttcatgga tccaatttat taaaatattg gtaatgggat aatgatttgt ctctccattt |
| 26521 | catgtacgct aaaagccaca attcttacaa tggtctgcaa gcccatcatg atccgctgca |
| 26581 | ggttaaccac gaaaattctt ttatttcttc acccttgatc ttaccagtgg tcctggccac |
| 26641 | ctcactgtcc tctggacatg catgtttgct gctgtcttat gaccaagact ctagttaatt |
| 26701 | tcttggcttg gaaagatagc cctccatata tccattgatc agctcactca acttcctcaa |
| 26761 | gtctttactg aaacctcaca ttctcgatga gacctattcg gtatttcaaa ctgcctccca |
| 26821 | gctgcaacat tcccaaaccc cgtactcttc tgtgtatttt tgaaaggatt tattgagata |
| 26881 | taatttacat agtgtagagt gcacacatta atgtctacaa gtcagtggct tttagtatat |
| 26941 | gcacaggtaa gtggagccat catcacaatg aattttagag cattttcttc acttcaaaaa |
| 27001 | gaaaccccac cttctctagc tgttaacctc ctatgcaccc atcccctact caatcctaag |
| 27061 | caaccacaaa tctgttttgt ctctatagat tttcctattc tattttcatc taaatagaat |
| 27121 | catacaatag gtggcctttt gtgcctggct tctttcagtt ggcataatgc tatcaaggtt |
| 27181 | catatatgta ttggtacttt atttcttttt ataactgtag aacattcaat ttcatggata |
| 27241 | taaaattttg tttatccaat aatattttta ttgacatttg agttgtgttc agcctttggc |
| 27301 | tattttaaat actgctgcta aaaatacttg tgtacaattt gtgtttgaac acctctttcc |
| 27361 | aataatctgg gtgtatacct aggaatacat ttctgggtca tatgacaatt ctatgtttaa |
| 27421 | tatatttaga agccatcaaa ctgttttcca aagtggccag ttctagccat agagtatcta |
| 27481 | actgtggttt tgatttgtag ttgcctgatg agtgatgcta ttgagtatat ttttatggga |
| 27541 | ttattggccg ttcgtgtaac ttcttgggaa acacatctat tcctatcatt tatcagtttt |
| 27601 | gagttgggat atttgttact gagttaaaac aatttttcta tattcaagat acatatatat |
| 27661 | atatacagac atatagacac gtgtttttca aatatcttct cacaattttt gagctgcctt |
| 27721 | ttgacttgct tggttgtcct ttgaaacacc aatgtcttta atttttaaga aattttaaat |
| 27781 | atctaatttt tattttgttg ctcatgtttt tggtgttaca gctatttctt tgctagatcc |
| 27841 | aaaatcctga agattttccc atatgcttta ttctagctct tgcatgtatg tctttaattc |
| 27901 | atttgagtta atatttttgt atgctttggg gtaagggttc gaatttatta ttttgcaagt |
| 27961 | ggtgatccat gtgtacgttg ttgacccagc ttgttcaaga ctgtctcttc ctcattgaat |
| 28021 | tgcacatggc accactgtaa gaatccattg actatagata catagtttta tatatggact |
| 28081 | ctccattctc ttccatcaat ctatttttcc ttcatcagta ttgtgttgtc ttgattactg |
| 28141 | atgctttgca gtaaggtgtg cagcacgggg gtgtgaatta tcctattatg ttttcttttt |
| 28201 | tcaaggttat tttggctatt ttgagtccct tgcgattcca tgtgtatttt agaatcagct |
| 28261 | tgtcagtttc tagacagaag tctgttggga tacttttagg gatttcatca aatctgtagt |
| 28321 | tcaaattgta aagtactaca atattaaatc ttccaattca tggctataag acatttgcta |
| 28381 | attatttaga tcttctttaa acaataattt ttaattttca gagtaaaata ttgtatcaca |
| 28441 | ttttccaaat taattattat ttcttttttg acgctattgt aaattgaaat gttttcttag |
| 28501 | tttcattttg gggttttcat tgtagatgtg tgcaattgat ttttctatat ttatcttgta |
| 28561 | tgctgtaata ttgctgaaat aatttactag ttctgtcgtt cagtggattc cttaaaattt |
| 28621 | tctatataca agaatgttat ttgcaaataa agttttattt ctttctattc aatatgggtg |
| 28681 | actcatttct ttagttgccg atttgccatg cataaaatct ttagtataat gttgactaga |
| 28741 | agaggtcaaa gtatatatcc tattcttatc tctgaccata gcgggaaagt atcctttctt |
| 28801 | ttaccattaa gttgcatgtt tgctgttggc ttttcacagg tgccatgtat ctggcgtaga |
| 28861 | aagttctcta ttcctggttc attgagtttt tatttttatt tttaatcatt aaagaatttg |
| 28921 | gattttgtta aatgtctttt ctgaatctat cgagatgatc atgcaattct cgtttcttat |
| 28981 | tctatggata agatatatta ccttaatgga ttttgggctg tttaaccaac ctgggattac |
| 29041 | ttgtataaat ttcactttgt catagtttat aattctttta tatgttgcta gatatgattt |
| 29101 | gttagtattt tttaaggaat tttgcattta tacttatagt agttttattt ttctatgcta |
| 29161 | tttggactaa tttttgtatc aaggtaacac tggccccaca gaataaattg ggaagtgaat |
| 29221 | atttctcttt tttaaaaaag ctagtcaaga attaatatca attattcaat actaacaaat |
| 29281 | attgttataa attattaatt tctctaattt ttattttctt ccttctgctt gctttagttt |
| 29341 | tgctattttt tccagtgcct taatgtggaa ggtcatctta tctcatcctt tcatttgtct |
| 29401 | tttcattttc taaatagtgt ctttttagca tcaggtgagc tccccaggtt ggtagtactc |
| 29461 | catgtttatt gctgtacaac aatgacaggt aatatgtcct gaagacaatg gaaacttaac |
| 29521 | attcaaaatc ctcctagatt ccaccttata tgatatgtct cttcctttaa ttggtcctaa |
| 29581 | tttctaccct ttctctatta taaaccatga gtacaatggc attcaatgag ttctgtgagt |
| 29641 | ctttctagta aattcttgaa tctgagggtg ttcaggggaa acccctgaaa tggcagttgg |
| 29701 | tgtcagaagt gagaatcgtc ttatatggcc tcttcctttg aactttgcag ctggacccaa |
| 29761 | actctgcata atttgggcca gaagtctcgt gttgactttg cagcctaaag taccttgtag |
| 29821 | tttgtctaac cctcaataaa tttgctttca tcaaatattg tatttgttac cgcaaaatta |
| 29881 | ccatcatgtt ttttttctcc aaataactaa cattgggaga aatagccagc tgaatctgta |
| 29941 | actcaacaga aacaagtgat ccatatacca tataccatgt aagtggccat tttgcctcct |
| 30001 | tccaccacat cttagcaacc tcaaccattg ccatgagcca ctgtaggcct accggctaca |
| 30061 | aacaaacaag tatcttttaa aaacacttca tactcccatt tgataaattt cccagcaaag |
| 30121 | agatgtctac tttaactcta tgcaagtggc tcatattcac gaagtctgga gatattattc |
| 30181 | atgtagtgtg agaaaatcat cccagcgatg ccagcacatt ctccttccca taatctgctt |
| 30241 | agtttgcaaa catattcagg ccataggtga gagatttgta tttcacagta caacaatttt |
| 30301 | atggagggca ttgaaactta gattgagcat tttagtacag tcacacatca ctgaatgata |
| 30361 | gggatacgtt ctaacagatg catccatagg caatttcatc attttgcaaa cgtcagagag |
| 30421 | aatattacaa acacctagat tgtacagcct accacgtctg ggttatacgg tatagcctct |
| 30481 | ctctcctagg ctacaaacct gtgtactaca ttactgtact gaatactgca ggcaataaga |
| 30541 | acacagcggt aagagtttat gtatctaaac atacttaaaa catagaaaag catgtaaaaa |
| 30601 | tatgtattat aatctcatag gcccactttt gtatatgtaa tccatctttg actgaaatgt |
| 30661 | tattatgcat gacatgactc tatgacaaaa ataaaataac acactgtaaa aaattacata |
| 30721 | tgtatcaaac atattaatat aaaaataaaa atattcagtg taagaatttg taatgatcac |
| 30781 | aaaatgttca cagcttatat tttagtacag tttcaaatgc ctagtgcaat tactatttat |
| 30841 | ttgtgtattt taaacatgta tataataaat atttttcagg ttcaacaatg tatatcaatc |
| 30901 | caactggctt ttataaatat tagttaaaat caattagtaa attcatatat atatacacac |
| 30961 | acgtgtatca gtgtgtgtgc atgtatgtgt gtgtaaatgt aattgtatgt gtgtgtaaat |
| 31021 | gtaactggat gcatcctaat atttagcctt acctacaaga tttccaagat tcatttatta |
| 31081 | tctttagatg atgtgcactt aaagatttgc caaataaaac tgtaaccgtg gaaaatatca |
| 31141 | agatgttatt aaattcatct tgtgcacgta attgtttctc tacatttatg tttcttgcac |
| 31201 | aacttgcagt aatgctcatg cacaaaataa ttttctaaat aaaaaataaa aacattttct |
| 31261 | cagtcattaa ttcttaataa ttatttctct ctgataatta ttgtgaatta attcttaatt |
| 31321 | cttaattata gaataatgtt gcctttcaga gttctgaatc ttttgcatgt tgtatacatt |
| 31381 | tcactaacta gaacaacttc tggaatattg gcattaatta atgtcactca gcaattattg |
| 31441 | atttcaaaga aattaaatac cattcatatt ctgaatcaca agggtgcttt ggcatctaat |
| 31501 | ttaatcaagc tctttgtatc atcatctaca ctttaattac ttaacaaaca tttctctgtg |
| 31561 | tgagaaagat tgagcaggtt attgtgcttt gttaagatgc aacttttgct taatctagag |
| 31621 | ataggcaatg ctctctataa gggacaaaga gaaaaatgaa agagcaatag agacgtgaca |
| 31681 | ggcatggaaa aagacaatac atttataaaa caaataggac cacagatgac aataatgggg |
| 31741 | atcaaatctt gagatactga ctcagtttat aaccgcactg tataatagag caaatcactt |
| 31801 | gttaattttt ttaaaaatgg aatttaattt aagatgaata cagtgtttta aacaagacag |
| 31861 | gtcatcttaa aataaaatag tggaataaag tgataaaacc aatgtaaaaa tcataaacaa |
| 31921 | tttataaaga atttttgtca tgtaatttaa tatttttatt taaaaatcac caaaatcaga |
| 31981 | ataattttat cttaattaac ataatcatca gaagttaact aatttttact ttataatact |
| 32041 | acgtttaaaa atctttatat ttttaatcat atatgcttat atataaaata gacataggat |
| 32101 | atatatttaa tgttcccaat attatattgc aattgttcct atggatgtgg tttttcaata |
| 32161 | gaattaagta cttttaaaaa gtttcaatct caatgatata tatgtttgat ttttctttga |
| 32221 | caaagcatac atatattgat aggtaataat atgaaaatct tctaaagaca ttacaggaac |
| 32281 | atgaaaatgt aattaaatac tcactaattt gtaatgtttt atgtaagcgg aacacattta |
| 32341 | actgaaaatt gcttttatat aataaacgag actagaaaca ttttaactaa cggagtaagt |
| 32401 | cttcaaattg ataatctgaa ctatacaaga ggagaaactt caggcactca aatatttgaa |
| 32461 | atgatacaaa atatttatat aaactattat ttaacaattt ctgtttgtag agtgctataa |
| 32521 | tcaatataaa tgacatctca agtctttcta tcgctttgac cacatttacc tcctaatttt |
| 32581 | aattactaat atgttggagc aatgcataca actagattct gatcttcctt tttaatgagt |
| 32641 | aaaaaatatg tcctttgaga cagcattaaa gaaagagcac cttgtataaa ttcaatgcca |
| 32701 | agagacaaga tattcttgat tctgaagtct tgttctttta tacaacaatg taattaataa |
| 32761 | taagaagaaa agcaggacat agatgtggag tctattttaa tcaaaaattg tctatagatt |
| 32821 | ttgatgataa aatttaaaaa tctactatat ttagtcagtt acaaaaaact aggttgtggg |
| 32881 | aacatatttg gtcaataaaa cacccctacc aaatgctaac aagaaaaagt tatgtaccac |
| 32941 | ctttcttctc tgcagatggc ctgagatggg ttaatttgaa agaatgtttc caaacctgag |
| 33001 | gtgacccctg agaacagcat aatccactgc tgtctcccac attcagtttc tcagtttgtg |
| 33061 | ctcttttaat cttgggggga gggaagccag tcctttaaag caatcttcag catgatggca |
| 33121 | gagccaagga gtgtggacag gtggcacggt gtctgactta gttccagcag ccacttgggt |
| 33181 | ttctctgggt tttctctgcc ctagggatag caccactatt gaaaacatgt ctttgtgaca |
| 33241 | ttctctatgc caggaactcc caacacattt tccttgaaac tgatgaaatg aataaaaata |
| 33301 | aaccaagagg tgtgctgttt gtttctgctt cctcctttct gcagcccttc ttgatcatct |
| 33361 | aatattttta aatacattgt cgatcaccaa aaggagcata aggggtatat tgatttgtag |
| 33421 | ctgatgtatt aatagccgag cccctattcc ttacctgtag ctgctgggaa gaaaaccatt |
| 33481 | cttaacactc tacaaggtct catctccaga atttgcacct gtttctagct gaggactttc |
| 33541 | tctagcagca cgggagcttg atactgggca tgaagtggga agaaaaggtg agggttacta |
| 33601 | agaagaatct ccctggattc agtgatgtaa ttctgaggca tgttccacat agcttcccat |
| 33661 | agaattaagc ccagatatct aacacaggaa cttgcctgtt aacacgtgtg gtactggctt |
| 33721 | ttctatcttt cctgttttat tttattctct cttccttgtc tcactttcgc tgtgtcctca |
| 33781 | ctcctgcttt aagaataccc aaacaaatac attcatttat ttttttagac tctcagaaca |
| 33841 | cagttgatag ttgaacttgt aacctatgat aatcagcttg gatgctatac tgaaaggaag |
| 33901 | atggtgaact caccatgtct aattaagata aaatttaaaa aatatattga ttcatgtcca |
| 33961 | aagatttaaa aaacctaagc ggcagtgtca caatttcttc tttttagttt acatggtttc |
| 34021 | ttaaatgcct acaattattt taaaggaagc cttgggttta gagaaaattg agacatacgg |
| 34081 | aataaattac taacccattt ctccttgaaa tccattagat gctgatgatt tttcacatat |
| 34141 | acttctgaat tgaaaagcta gttgcgaatt atttttataa gcatatcctt atgtaatatt |
| 34201 | ttgtttttaa cagtaagttg aagatttaaa gattaaatta ttctatccag agaataattt |
| 34261 | aatctttaaa tcttcaattt actgttaaaa acaaaatatt acataagatt ttaaaacagg |
| 34321 | tcccatattc ttttgagtca attagaatat gtttgtatca gtctgtctac agttttacac |
| 34381 | ctgtcaaaat gtacttgaac tacaagtacc ttgaacaatt ttcacattta ttattcctct |
| 34441 | gaaaatgatt aaaagaatta gagtgaaatt ctgattggca taatttggga gagaaattat |
| 34501 | tccttggaga tcaacctctg ccaagatagt ttataatgac attgagactt tttgatttac |
| 34561 | aaagtttgtt atataaaaaa tactaagacg atgacagata atacacacac tttaattaaa |
| 34621 | attgtactaa aattaaatgt ctaaataaat tagaagggta cgtggtacat ctaattgtat |
| 34681 | gtttatatat ttcatttgtg tattttattc ctagggttgc ttttgcttta gtttgtaaca |
| 34741 | cgttcttatt tttatgataa tgtagtatat gctaaataaa gaaaaatcag gaaatagaaa |
| 34801 | atgaagaaga aaacattagc tattgtcaac caaataaaaa ttgtgcaatc tctaagcaca |
| 34861 | tgaactatgt attatttgta cagcatgtac aatgtttatg cttcacaggg tgaggtagag |
| 34921 | actgcaaaac attgaacctg ggacaaataa gaaagtaagg aaattttcac aatatattaa |
| 34981 | tattatagaa aatgttgaac ttaacagtta agatacaagt agtgaaaaat gatagtattt |
| 35041 | aaggagatct agaaaattta atctatatct gtaatgtgtg agaagtatta gaataatgct |
| 35101 | tgtatttctg gattggcatc gatttctatt gagactggaa acataataga aatgagggaa |
| 35161 | aaagaactta aattgtggat acttgagttt tatacctagg agtttgagaa atacattttg |
| 35221 | ttactatcaa agcagttggc acaagagtgt acaaaattcc ctaattgtgt caacgtggag |
| 35281 | aagacataga caaacagaga atagcaaaat agaaatagca aaaaagcaca aataaatttt |
| 35341 | acctgtattt ttacataaaa gccaattaga gtaggaaaac atgaaatttg tgtttaatca |
| 35401 | aaatttttct ctttcttata gtctagtgga ttatattact ggaaaaaaat tgaagcattg |
| 35461 | gtatgttcac aaaaaaaagt aaaatataag gtcaaaacca tgggaatgca gggagcagac |
| 35521 | aaaatatacc taaacaccga aactgatttt gccctacgga catgtaccaa aatgaatgag |
| 35581 | tgcagattcc tactgtcata catcacatag gacagtaaag aaatacatag tttttcctaa |
| 35641 | gatagggcat cacacaggag ctcctcccta aagctaggac caaagtttct atcctcagta |
| 35701 | taaagaagaa tcagaggtaa attagtccca tttcacattc cctggaaatg gcaaataaaa |
| 35761 | atgattgaga ttggacagat ttaaagaaat tcaatcatta atgatttaca gcaattaatt |
| 35821 | taaaaattgt ttaaatgtgc agtccaaaca tatgtccaaa cacctttagg ccaagaatta |
| 35881 | atataatgtg gtcccagaat ggtggtgcgt ttagtagact cacaaaaaaa ttcaaattct |
| 35941 | ctttggcaaa ttttcttctt actaatccgc aaaagtgcac aaaaataatt ttcagagaaa |
| 36001 | aataaatatt tgtcattcag aggcatctaa gtacacaagg aaatggtata ccaccgtttg |
| 36061 | aaaggaaagc agaaaaagag tacaaacaga tccacaaagg ttcattagta gaaatatcac |
| 36121 | tgttagatta taaagcacat ttgctttaaa aaattttttt taaaaaagaa tatattttag |
| 36181 | gagactaaaa aattgatgta gaaaatttgt aaagtagctt gtataaaaat atagtatttt |
| 36241 | aaattaaaaa ctcaaaaatg aactcatcag attagacatg gccatggtga gagttaataa |
| 36301 | atatttcaca atgcatcaca gaaaatttaa aaaaatgcaa aatgtggaca gaatcatgaa |
| 36361 | gagacaagga agataccgtg agaaagtgta gcatgtgttt agtgagtgtt ctcatagaag |
| 36421 | aagggaactg ggaagggaca atatgtgatg gtattttggc tgaaagttct ctagactttt |
| 36481 | gtaagacact aatccgcata ttgaaaaatt ccatgcatgc taagcaagct acaatggaga |
| 36541 | taaacctaca cctacgtatc tcctagagaa atagcaaaga atcaggaagg gaaaaatatt |
| 36601 | tcaattagca ctagaaaaat caaattacct ttaatcatat tgaaatcgga aagaatgaaa |
| 36661 | ggtaaaataa aaaatattat ttgttaataa taataatgcc attctgaaat tctcaaccaa |
| 36721 | gaaaaatatt catcaaccta tggctaaata acatatttag agagaaaaaa caaagcacca |
| 36781 | ccagcagaat tccactaaag aaactaaaaa gaaactctga aaacatgctt cagaaaggtt |
| 36841 | gaagttctga aatcaaagaa tgaatacaga gcaaaataaa catacaggta gatctaaata |
| 36901 | aaaaattagg tgttgaaaca aaaagatatt taaaattaga taagcactgc aatatgtatg |
| 36961 | ttaggaagca aattattagg gctgaagtat tcaatgaccc cttaattgtc tgacaagagc |
| 37021 | agaaaggtga gtatgacttt gcaacttttt tttttttttt tttttttttg aggaggagtc |
| 37081 | tcactctttc acccaggctg gaatgcggtg gtgccatctc cgctcactgc aacctctgcc |
| 37141 | tcccaggttc cagcaattct cctgcctcgg cctcctgagt agcggggatt acagccgcgt |
| 37201 | gccaccatgc ctggctaatt ttcgtatttt tagtagagac ggggtttcac catgttggtc |
| 37261 | aggctagttt ccaactcctg acctcgtgat ccacacgcct cggcctgccg aagtattgag |
| 37321 | attacaggcg tgagccactg cgcgcgaccg attttggaac tttaataaat tcagtggaca |
| 37381 | ttatgcattt ctctgttgta tctatgaaaa caataaaaat aaaagtcata atttaaaaac |
| 37441 | aagaagacag aaactgatag gagaaaatga cacattatat acatatatat atacaacaaa |
| 37501 | ttaataaaac aaattacgta taaatgatca aagattaact taaacctaag tagacaatgt |
| 37561 | ttttgttaaa atacaaagat tggcaaaatt aaaaaaatcc gtctctatca tagttacaag |
| 37621 | acaggcaact aatatataaa tttacagaaa ctttgaagtt caaacaatac agatactgtg |
| 37681 | tatatatgat atacatacaa acatactaca tgaatataat tttttaaaaa gttgctatgt |
| 37741 | agacaaaata gaatgtaagt tagaaacatt tattaaaata agttagtcta accagtgtga |
| 37801 | taaaagtttt aagttattaa gaagatgtga tgacttaaat gtgcattagc ctgatacata |
| 37861 | tatacatata tacacacaca ccacacacac acacacacac acacacgtat ttagatagtc |
| 37921 | aaattatata aagcaaaaat atcagaaagt aagtagaaat ggataagccc ccaaatcatt |
| 37981 | agacatttca aacacacatc tttcagtaat agataaaaga aaaaattaaa agagtaagtt |
| 38041 | ttaaaagaag ctagtggatt ttaaaaaggg caaatgttat ataaggaaca tgaatattat |
| 38101 | aattcatgtt attttcatgt tcatacagaa tacttacaaa aattaacatt ttctagacca |
| 38161 | taccacaaat tcaaacaatt ttcacggaaa taacgtgaca cagaatatat ttcctaaaca |
| 38221 | aacagcaatg aaggtagata tcaatacaaa aaagaaagct agaaacataa gtctaataat |
| 38281 | attggttgga agctgtttta attaatattg aaatatttta aaggtgaata gtcaacacaa |
| 38341 | atgaaccaaa cacttttgta aggccactaa gatgcatgtg taatgtgtaa tgcctccttt |
| 38401 | tataaggagt aaatctgtaa catcacctgg gctatttgac aactgcaaag tgaatgtgag |
| 38461 | aaggagagaa acagtgagag agagagagag ataaaaccag taaaataaac ataaagaatg |
| 38521 | aaggagatag ccgggcgcca tggctcatgc ctgtaatccc agcactttgg gaggccaagg |
| 38581 | caggtggatc acctgaggtc aggagttcga gaccagcctg gtccaacatg gtgaaaccca |
| 38641 | ctctctacta aatatacaaa aattagcctg gcatggtggc atgcacctgt aatcccagct |
| 38701 | actcagaggc tgaggtggga gaattgtttg aacgtggggg gtggaggttg cagtgagtag |
| 38761 | agatcacgcg actgcactcc agcttgggcg acagagcaag agtccgtgtc aaaaaaaaaa |
| 38821 | aaaaaaaaaa aaggaggaaa tagtacatga aaaagcagaa ttaaagcaac tgagtatata |
| 38881 | tttaaaaatg caacagctca ctttttcaga aaaatattaa aatattaaat ctaacaaata |
| 38941 | tctaggtaga ctgatggaga aaaatacaga aaatgcacaa aaaaccaatt acctggaatt |
| 39001 | caaaggttac aaaacgtaag cagttgtagg ttttaaataa gcaatgactt tgagttcaac |
| 39061 | catgatgggg tatattgaaa agaatctctc agaaaaaaag aaaaactgtt ataaagctat |
| 39121 | gtagaaaatg ttaagcacta ttaaagtctt ccaattctac cagttatgga gttattggtc |
| 39181 | ttggactaac tctcctgaaa agaaaaaaaa caaaacaaaa cctaaaaacc tggataaaat |
| 39241 | ggcctaccgt gggcactggc aatgcaacca agcaggtagg acatgggtgc tactttctct |
| 39301 | ttgtcagaac acaaagcatt catacactct tctcaccctc actctcacct tttaatctta |
| 39361 | gatctactat taaatgtatt caactactat caatcctttg gtcaaaattt cttttctcac |
| 39421 | attttgcttg atgcacttgg atagactgtt caagaaagtg tgagtactga attcctcaaa |
| 39481 | ctcttgcata tttaaaatta catttttgaa ccttgatgct tgaagtgtag cttgggtaac |
| 39541 | aggtgggctt taagccgatt ttggcatgca aggggttgag tttattaggc atcagcacct |
| 39601 | ctgaaaatcg tggggatgca ggcttaattt caacactatt ctaaatactt gaaagatata |
| 39661 | taattcctta ataaactcct ttgtctacaa atggttcaca ttaactcaat atccatgatt |
| 39721 | aaacatctat aaaatcaagg cactgttatt tagtggagac ttgctggcta ttctatgaga |
| 39781 | ggaggtattg ttattttaat ctcatcctct cataaaagtg tatcatatta ctcataacca |
| 39841 | gcccttcata ttctattcct attttggtat tttaaaataa gatatctttg aaactcttga |
| 39901 | attcaaatag agaatctgaa tagtttttaa aatgtcaatg aaatgccatt tcttcatgct |
| 39961 | tcaacaacta aaatttgact aaagtgcttc tcttcaaact ttctgtaaca ttttttaatc |
| 40021 | taaattctaa gaacgatcac aataggtttc aaccacaaat gtgagaatat tgtaaatgtt |
| 40081 | cgggtggaaa aatttttaaa ataattttgt agtaattttt gaatcatagt gacagtgcgc |
| 40141 | taaatttttt taagtcaaat attactgtag acatttaagt caagattcta agaaactgtt |
| 40201 | ctaaagtcca aaatttagtt tcatatacaa tgatattata tatatatttg catataaaat |
| 40261 | taatatatgt gagccatgtt tcaaatagtt gagagattat atcaaagatt cttgattata |
| 40321 | taaaatgcca attacttata ggcacacgtg ctttaaataa ttacaaaggc agctgtggtt |
| 40381 | gattctactc ttgctactgg catttatatg gacatactat tatggtctga agaatattta |
| 40441 | ggcaaattta tccctcatac gatcagaaga acaatgcacg atagtttata tctgaaagga |
| 40501 | aaaaaaatct ttatatggtt ctgaaagcct aaatcattaa caacttggat aataattagc |
| 40561 | ataaaaatac acaaacatgc cctcttccta gcggtaagta cagagtgaca acagaatcaa |
| 40621 | agcatgtggc tatgtgcatg tttatatttc aagacgcaga gcactctatt cctcttctct |
| 40681 | gccctttcta gatggcacaa ttcctcatga atctaagtgc tgtcataggg tggattaggg |
| 40741 | tgacctgcca tttgtatgca accgatctct attttggaag taattaatgt aaaaatatat |
| 40801 | ttttaaaaga taatttcaaa tttcagggca aactagcatg gtttcacccc tttcctttgt |
| 40861 | aacatttttc ctaaggttgg aaaagtaagg taggctttag tacgattttt aataacaagt |
| 40921 | tttcaaagtg agacgcaaaa tggtggcgcc aacacatttc aagtctgcta cattttgaat |
| 40981 | acacttattg gagaaaagac cttctcatca tttttctctt acaggaaagg aaataacatg |
| 41041 | tacagttgac ccttaagcaa caccgaggtt ggggtgctgg cccccctgca cagtagaaaa |
| 41101 | tccactaaaa ctttgactcc tccaaaactt aactactaat agcctactgt aagccttaca |
| 41161 | aataacacaa gcagtcaatt aacacatatt taatgttata tgtcttatat actgtattct |
| 41221 | taacaaacac gccagagaaa agaaaaagaa aatcataagg aaaatatatt tactagttat |
| 41281 | taaatggaag tagatgatca aacaggtctt catcctcatc cttttcatgg gcagggtgtg |
| 41341 | gaaaaggatg tagaattttt ggttttgcta agtggacccg cacaattcaa acccctgtgg |
| 41401 | tgcaaaggcc aactgtatag ccactgaata gcaatttatt tctagaaatt aacctcacta |
| 41461 | aaatattctt agaaagatgc caagaaaaaa atgaataagt atttttggta catctatttc |
| 41521 | atcatttcat ttcctcattt catcatttca tttcatcatt tcatttcatc atttcatcat |
| 41581 | ttcatcattt catttcatca tttcatctca acatttcatt tcatcatttc acttcatctc |
| 41641 | atcatttcat catttcattt catgatttca tctcatttca tcacttcatt tcttcatttc |
| 41701 | atttcatctg aacatttcat ttcatcattt cacttcatct catcttttca tcatttcatc |
| 41761 | tcatttcatc tcatcatttc atctcatctc atttcatctt ttcatctcgt catttcattt |
| 41821 | cgtcatttca tcttttcatc ccatttcatc atttcatcaa ttcaacattt caattatttc |
| 41881 | atcatttcat catttgactt catcatttca taacatttca tttcataatt tcatcttttc |
| 41941 | ttttcatcat ttcactttgt catttcattt tgtcatttca tttcctcatt tatcatttaa |
| 42001 | tttcatcctt tcatcatttt atctcatttc atcctttcat ttcattattt catcatttca |
| 42061 | tctcatcatt gcattttgtc atttcatttc atttcaacat ttcacttcat cttatcattt |
| 42121 | catctcatga tttcatttca tctcatcatt tcatttcgtc ttttcatctc atttcatcat |
| 42181 | ttcatctttt catctcattt catttgatca tttcatcaat tcatcatttc atcgtttcat |
| 42241 | tatttcatca tttaatcatt tcacttcatt tcatcatttc atcatttcat atcatttctt |
| 42301 | catttcatca tttgatcttt tcatttcatt tcaccatttc atgatttcat ttcatttcac |
| 42361 | ttcatcattt catttcattt caccatttca tcattccatc atttcatttc accatttcat |
| 42421 | ttcatcattt catttcatcc tttcattatt tcattgcatc atttcatctc ataatttcat |
| 42481 | tatttcactt catctcatca tttcatcatt tcatctcacg atttcatttc atctcatcat |
| 42541 | ttcatcacat ttcatctcat caattcatct tttcatctca tttcattatt tcatcctttc |
| 42601 | atctcatcat tcatcatttc attttatcaa ttcatcattt catttcatat ttcatcattt |
| 42661 | catttcattt catcatttca tcatttcact tcatcatttc attccatcat ttcacatttc |
| 42721 | ttcatttcat atcatttcat catttcactt catcatttca tttcctcatt tcatttcacc |
| 42781 | atttcatcaa ttcatttaat catttcatct catttcattt catcatttca cttcatctct |
| 42841 | tcatttcatc tcatgatttc atctcatcat ttcatctttt catctcattt catttaatca |
| 42901 | tttcgtttca tttcaccatt tcatctcgtc atttcatttc atttcatcaa ttcatcattt |
| 42961 | catttcatta tttcatcatt acacttcatc atttcatttc atcattgcat atcatttctt |
| 43021 | catttcatca tttcatcttt tcatttcacc atttcacttc atcatttcat ttcctcattt |
| 43081 | catttcacca tttcatttca ccatttcagt tcatcatttc atttcatcac tccatttcat |
| 43141 | catttcatca ttttctttca tctcatttca tcatttcttc atttcatcat tttatttcat |
| 43201 | catttcattt aatttcagtg atacatgtat tcaagtgcta atgtgatgcc caggagacac |
| 43261 | cctatttccc tttgtaaaac acctccttca acaaaaggca acctctcatg gctggctaag |
| 43321 | tctacaggga taccagcctc tcttcaacca cccaatttga tttagaacct caaacagcac |
| 43381 | ctcagtttca taaaaaccta aaacataaaa cacaacactt ggttgtaagt gagccaacag |
| 43441 | tttgtctctt tctctgccca aggcttaagg ccgtgtttcc ccaactacgt tcagtggaag |
| 43501 | aaaagatccc ctggacaaat aagtttgaga actgttgttg caggacttct cagaaccttt |
| 43561 | aaaacacaaa tcctcatccg gagggatctt caggagggag atgtctgatg cagcacaact |
| 43621 | ttctttcaca ggagcatcct gcagaataca gtatgagatg cagaaaggct gcaatgagtc |
| 43681 | tttttaatgg cccgggcctt ggtgggggtg gggtaggagc tctccagata gcatctaatg |
| 43741 | agtaggaaca ttcaggttgc tttttttttt ccttattggc aaacctgtgt gcacaccatg |
| 43801 | aatgaagctg atctccctta tccatatcaa aactaaaccc aaattaattg gctaaattgg |
| 43861 | gaatcaacac ctccaggagc tacgcagaag aaagccccac cacactttaa agtagcttac |
| 43921 | ctcatatttg acgaaagcaa aacacttatg accagtgtgc tgctaataca agtctacaga |
| 43981 | taacgctgca tgaaaaatta gttttcccaa tcgtagctgg catagtccac attttgcatt |
| 44041 | acactttccc cccttgtttt aaattttaaa cacaggtctt tttctcttct ttttttaaat |
| 44101 | tttaatttaa ttatacaaga cagagtctca gtatgttgcc caggctggtc ttgcactcct |
| 44161 | gagctcaagc gatacatccg tctccgcctc ccaaagtgct gagattacag gcctaagaca |
| 44221 | ctgtgcccgg ccttaaacac aaatcttaat tcattcttac agttatcctg aggttagaaa |
| 44281 | aatggaaggg gaagaaaaat ggcaagcagg taggttgact tcggcttcat tatttgaaag |
| 44341 | gacagtttgc tcagttaaaa cacactactg cccacaaagg ccaagacaac agaaaaatac |
| 44401 | agacatataa atagatttta tatgtgacag cagtttcaat ggagactttt tcaatgcaaa |
| 44461 | tgacaaacag ctgtgcttgg gaataaatga caaggaattt tttttatctc aacagctgtc |
| 44521 | ctgagagcac atctctacat ctctacctat attctggaat cagggagaaa gccaaaacgg |
| 44581 | atgacaagat actagatcag ccgtgtccaa cccttttagt acaaggactt ttccgcctat |
| 44641 | ctgtggtggt gggtatcatg aaaattatgc acaaaccttt tttttttttt tttaagctca |
| 44701 | tcagctgtcg ttagcattag tgtattttat gtgtggccca ggagcattct tcttccaata |
| 44761 | tgaccccgag aagccaaaag actggacacc tgtgcactag atcaaaaggc tactccttct |
| 44821 | ggaagcaatt ataaagaatt tctgacatta tcttgacatg aaaaccaatg gatagtggga |
| 44881 | cagaatgcaa aatcttcaag aatttttctt gttggttttt tttttttttt ttttttgagt |
| 44941 | caaggtcttt ctctgtggcc caggctggag tacactggtg agatcacagc tcagtgcaga |
| 45001 | ctcaagtgct cctcccacct cagccacagt agtagctggg actacagatg cgcacaacca |
| 45061 | cccctggcta atattttatt ttttgtagag atggggtctc actatatagt ccaggttggt |
| 45121 | ctcaaactcc ttgactcaag ggatccagga caggataaca ggtgtgagga gccaccacac |
| 45181 | ctggccatgt gcatgaactt ttaagacaaa cacaaggccc cacaaaagtt aaggttttcc |
| 45241 | cacctaattt ccaggggatc ttttggtgca aagctgagaa gcccttaaaa gtacacagac |
| 45301 | aactccaaag attcaagaga gttcattcgg ggtgagccag cccactgggc agactgacct |
| 45361 | tcaaaaaagg cccacccatg acacacacca gatggctctc caagaatctc ttcagtcctc |
| 45421 | agggtcccta aggcactgga cagagctagg aaagcaaacc catttgcttc tccctgcagg |
| 45481 | aaaccccttg aggtcaagac cccacaatca gacaaggatg gagtggctca ccttcagtca |
| 45541 | acaggccaga ctcaaggtgg tataatgtct taaccaaggg tgcagtcctc caggtctgac |
| 45601 | tcccaactca gttctccttt aataaccaca ctttgttaat tctccttaac aggagttcct |
| 45661 | gacaagtcag ttctccctca gaccttcagt ggcctcacct agaagatgag agggctggat |
| 45721 | cagatggaaa ttcggggagt aagggaatgt cggcacgcag cccacctccc ccaagggacc |
| 45781 | ctggagcctc catcccagtt cccaccatgc acccgcccca caaatcctgc ccaaggtgag |
| 45841 | ggctggtccc gggtcctccg ggtgccgcaa cagcgaggga aggagggagg ggaagcctcc |
| 45901 | aagggcgcga cgcaggctca aggatgcaac tcggccagga gtgaactggg gacccgaggg |
| 45961 | aggtatccgg gctgctcctc gagcccagcc cgggtccccg aaccccttac ctccagggtc |
| 46021 | cgtatctcct gctgggtgag gccgttggac acagcgcact tggtgcgcag cccgtgcagg |
| 46081 | ctgccgatgg agatgccgat gagcttctgt agctgcccgc actgctgcag cgtccggctg |
| 46141 | gccgcggccc ctgcgccacc ccatcacccc cgcccccgcc ctccttcttc tctcccatag |
| 46201 | cctccccgcg cagcgccgct ctatgcaggc cacagtggcc aaggcgggga gcccggggcg |
| 46261 | cgggcgccta ggcaaggaac cccggagacg ggagagctgg accaggagcg cccctcggcg |
| 46321 | gtgcccttac caggacgcca gtagagctgg cagccgagtc tgccgctccc gccctcagaa |
| 46381 | ccgcggcggc ggggacaaaa agccgcggcg gcgggggcaa aaaggcacgg tggctggggc |
| 46441 | aaaaagctgc aaaaagcacg gctgcggggg caaaaagcag caaaaagccg cggcggcggg |
| 46501 | gggaaaaagc cgcgggggca aaaagcagcg ggagcggggg caaaaaacca cagaaagccg |
| 46561 | aggcggcgag gggaaagagc cgcggcggca gggggcaaaa agctgcaaaa agcagcggcg |
| 46621 | gcaaaaagcc gcggcggcgg gggcaaaaaa accgcggcgg cgggaggcaa aaagccgcgg |
| 46681 | cggcggcggg ggcaaaaagc tgcaaaaagc cgcggcggcg gggacaaaaa gctagggcgg |
| 46741 | caaaaagccg cgctaacggg ggtaaaaagc cgcggcgaca aaaagccgct gagagggggc |
| 46801 | aaaaagcagc gggagcgggg gcaaaacaca aaaagccacg gcggcggggg caaaaagctg |
| 46861 | caaaaagccg cggcggcggg ggcaaagagc ctcggcggca aaaaccagcg gcggcggcgg |
| 46921 | gcgcgaaaag gcgcaaaaag ccgcggcggc gggggcgaaa agccgcaaaa agcagcggcg |
| 46981 | gcggaggcaa aaagccgcgg cggccggggc ggaaagccgc aaaaagccgc ggcggggcag |
| 47041 | gggcaaaata ggagaaatga ggtaggaggc cagcacaact tggcattgct ggagtgtgat |
| 47101 | gtgataggaa aagtgcagcc aaagacaaag aaagatgtaa gttggcttga ctcagtgcag |
| 47161 | ctaagaaccc agatgttatc ttgagggtat taactaataa gcagtttaaa tcagaatggc |
| 47221 | acattctgat ttgtttttta tattcacatt tggcaggcat agatactgtt tgaagagagt |
| 47281 | aaagtcagta gatagaggta acaaacttaa atatgtgcca agtctagaaa caagagacta |
| 47341 | gggggataag gacctttcaa aagaaaatgc aagatttgaa aactgattgg ctgggggatg |
| 47401 | aggaaaaggc acgtctttaa ggtcaatccc tgttttgctt taagttgtta gggggtggtt |
| 47461 | ttatcacata ttgtagaata tgtcatttca gttttgaaca tcttgagtta aattgtccta |
| 47521 | acatatttta tgaatttgat tttcttccct gggaagctag tatttcaaaa acttaaagag |
| 47581 | tatagatttc caacttgtat ccaatttata aaactatctc taggctgctg gtttcaggag |
| 47641 | gaggctcatg aatattctat ttgcagagaa tatatcagga gttaacaaca gcgtcagtat |
| 47701 | ttgtggacga ccagttaact aagccacctc ttagtgtatt tagataggaa atcttagctg |
| 47761 | aagatattca ataatgaacc aacagtgact aaaaaattca atatttaagt atatttcatt |
| 47821 | gcaattaatt tgaatttaag tagccatata cagctagtat ttactacatt gaaaaatgca |
| 47881 | aacaagagga aaaaattaat aaccatccct aataccacat gccaaaatcc tcatcaattt |
| 47941 | attctagcta aaggagttga tcagaagcac caatttaaag caccaatcac tgtcgttctc |
| 48001 | tcagaaccat ctcttctctg aacaaaacaa gtagaagagt taatagtgaa tctgcatttt |
| 48061 | ccttgcctat tttaaggttt tgatgttgac actaatttgt gaaatccctc ctgtggtgtg |
| 48121 | atatttcgtt ttccttgctt tttgttagga caagaatgct tcagctctta atttaaaatt |
| 48181 | atgtttctcc ctcccaggtg gagtgaactt agcatgcatt ctctgacata tccaagtttt |
| 48241 | tgttaatatg aatttggggg gaaaagcata cttaattagc taagacttct tattctaggc |
| 48301 | ttgaccctgt gttcgacatc tttttaattt gtagttgcat aggctgctct ctgacactgg |
| 48361 | ttagtgatct ggaagctata ttaacgttag gagaggtggt gtatgagcac tagaggtatc |
| 48421 | cttgcaaggg aagacttgtc ttatgtcaat acgtcttttt tttgcacaca agaaagtcaa |
| 48481 | tgtttgagtc ttctaaaatc ttcctatttc caagttgcag agtacaattg attcctaaac |
| 48541 | aacgatctaa tttttgactc agagacgtgg caaggtagtg aatcaccatt ataatttaac |
| 48601 | aatcttcaag ataaaattat ttctctgata tttagatttt gcccaattat taagatattt |
| 48661 | gggtgtttcg ttaagaatgg aagactctag tctcttgagc agagactata aaggcctcag |
| 48721 | atgatcattt ataattttat gctcttttct ttaacacctt caacacagtt ggaagcagcc |
| 48781 | aatattcccc agtgttgttg tgttttttaa accaaatgca tggttcagtg gtagaaaact |
| 48841 | gggctgatcc aagctgtttt cagtaaacac ttcatttcag gtgacctatt tcatattaaa |
| 48901 | taatctctag atcctgtctt caaaactaac tagatcagat aacctaccct agattttccc |
| 48961 | ctttagggtc tgttagctgc agtcactttt gtgaaaatga ttgcgatgaa aagatagagt |
| 49021 | tgtagatggg gaaaatgttt tgactaattt aagcatagtg gtatttaata tgagaattta |
| 49081 | agttacacac atttgaaaat tataatggag tctcttggct gagctttaaa aaaaatagcg |
| 49141 | tttaggctaa aaagggaact gctacctctc ctaaaatcag aaagatgtta cagtaattct |
| 49201 | ccattctcta gaattatcag gaagcacctt tgtgatgatt tacttttgct cttgggagtg |
| 49261 | tgagcctgtg tagtcgtgga accgtcaatt agagtgatgg ctttctgatc ccaaagtcat |
| 49321 | tcgttctgaa aacaatattt ttcataaatt tgaatgtgag aagttttgat cttgccattc |
| 49381 | ccaagtaact ctcttaataa gaggcatcag catgcttcag tgacagctgt caccttccag |
| 49441 | tgctgagagt catctttgag ttctccattt cactccctac actccaattt agctgcagtt |
| 49501 | ctcttggcca gtcctatgaa atacatccat ggcctaacga cttctcacca ctaataccac |
| 49561 | tcatacttac agcattctca cctaagtcac tacctttttt ctctggatta caatagcctc |
| 49621 | ccaatttatt tgctcacata acctatttat tctacacagt gcaccagata cacccctttg |
| 49681 | aaatgcaaac ggaatcatat tattctctgg tgaaattatc tcatatattc ctatcgcatt |
| 49741 | taaaattaat tcagaataat cccatgatta tcaaaaccct atgtgctctt ccacaacatg |
| 49801 | atttacttcc aagatatctc ttcttcaact tttttttcac tgtactgaat tggtgactaa |
| 49861 | aagtcatatt tttgtttttg cttaaaaagt cttgacttgt aaatttttca gtttctcctt |
| 49921 | tatccacagg taactctttc ctcataaggc gaattgcttg cttccttgag ttctgctctc |
| 49981 | aaagataccc ttcatgttct acctaatatt aataacttta atcattcatt attccattac |
| 50041 | tatgctctat agtgtataca atttctgttc tttgtcctgt tattaactaa attatttatt |
| 50101 | tgttccagta acgtattcca taaatattgt acacataaaa attatgttat ttttattgct |
| 50161 | gtatgctcag ctgcccaata acagtttgag gattaacata tttgttaaat gcacaaatac |
| 50221 | attctttcac aaatatttaa taattttata ttaaactccc tatatactta cagtatgaat |
| 50281 | tagataattc agaataaaca ttccattgga aaaaactaaa caatttgtta taaaacatcc |
| 50341 | ttaaaagcat cagaaggtta atacagacat gaagaattac aggaccaaat taagaacggt |
| 50401 | atggaagcct gtttgtgagg cttatgtttg ggttatctct ttacttagag tgactataaa |
| 50461 | tctcaaaaga gaactaaagg gagaaataac catatctact aacatggtaa gggtatttaa |
| 50521 | acatctctta gtaattgaga aaattgaaag aaaagaaaaa agaaagggag aaagagaaac |
| 50581 | agagcaaaag ggataatgaa ggagagaaag aagaagagaa aggaagagga agaaaagtaa |
| 50641 | aaaggaggag gagggggagg gaggaagaaa gaaaggtgaa aggaaagaaa ggtaaagttt |
| 50701 | ttaacagcat aatttatcct tgtagaatat gaatgttggt ctatttgatg atgtcccaca |
| 50761 | gattccttag tctctgctca ttttttatct gtttctcaga atcaatattt tccattttct |
| 50821 | tatcttcaag ctcatgactt tttctgtgtg tgcaaatata ctcttaaatc cctctggtga |
| 50881 | tttttaaatt tttatcattg tagttttcca ctccagaatt tctgttatct ctttgttgat |
| 50941 | attcctactt tttaatattt ttttctgatt ccttcatttc tttgtttatg ttttcctttt |
| 51001 | gacatttgac atttgagtat aattaagaga gttgttttaa agtctttgtc tagtaagttt |
| 51061 | gatgtctggg tttccttaga gatattttct gtcaatttat tttgtccctt tgaatgaccc |
| 51121 | atactttccc gttctttgta tgccttgtaa ctttttttga aaactggaca ttataataat |
| 51181 | tataattact atgtggttac tctgtaaatc agaccccccc ctacaaacat actaacgttc |
| 51241 | tgtggtttta aattttattt acttattata ttgttaagga ttttttttta gtgaaatttt |
| 51301 | ccaaagtgat taacaaaact gtttgcttta taaggtgtgg tcacccaagt ctttttgttt |
| 51361 | ccttaacaaa tgttaagata atgttttgac tgattttctt gtatgtcagg aactaagcaa |
| 51421 | acaggcaaat acaacaaaaa caaaaagaaa aacaagtaat cattatccag caaaataggt |
| 51481 | ctctaggcca tgcagactgg ctttgtgctg ggttctttaa agccgggaca aagtgtgtgt |
| 51541 | tcactcttgc actgagtgaa gttcaagttc actcttgcac agagcctgca ctgaggggag |
| 51601 | ggatcagcga aggtaaaagt gtagggtctt cttatgacat ttgtcagcat gtggcttaac |
| 51661 | gtatgcatac atgtgacttt ctagactctc ccatgtacgt gaatgatttt gaatgtctta |
| 51721 | gttttccata tactctactc caacttttct tcctgtgctg aaggtgatct actatatgtg |
| 51781 | taaactctaa tttttgccct aagcatctgt ggcttgttag gtctccttgt agagtttctt |
| 51841 | aataatgtcc attccttatc tgttctgtat cctagcaaca cacacaaaaa agcctttcat |
| 51901 | tagtccttta ggtatccccc agaccagtca gaacagacac ataataattt gagggtaaga |
| 51961 | tcttctcttg ttcctttgga cgatggacca ggtttcctca ctgggaacgt gggcttctga |
| 52021 | cacttcaaaa cagccaattt gctggggcaa aggcaagtta aaaacgtcat aaagttttca |
| 52081 | agttgtcttg ttcttgagtc tgctttcact tggttgttgt aatcttttga ccattttcca |
| 52141 | gagttttggc aaagtttatt cggacagttt ctcttagttg tgtgatgttt ctgtggggaa |
| 52201 | gtgaaagatt gcagttgtct ccactgccat tttgctgatg ctcctctttt gtcaattttt |
| 52261 | gcttcatgtt cttatgcttt gttattagtt catgtattag ttttctaggg ctgccataac |
| 52321 | caagtaacac aaactgggtg ccttgaacaa cacaaattta tagtcttata gtcctggaag |
| 52381 | ctaaaagtct gagactgagg tgtcagcagg gatggtccct tcaagggcta tgagagaaag |
| 52441 | tctgttctgt gccttgtttc tagcttctgg tggtttagtg gcagtctttg gcatttcttg |
| 52501 | gctaatctct gccctcataa tcacatggta ctctccctgt atgtatgtct ccctctactc |
| 52561 | aattttcttc tttttataag gacatcagtc atattgaatt caggctcatc tgattttatc |
| 52621 | ttaacttaat cacctgcaaa gaacctattt cctaatgagg tcatattcag tggttaggat |
| 52681 | ttcagcgtct atatagatga aacaatttag ctcatatttg tgcatacatg attgtaatag |
| 52741 | ctatgtcttc caaaagtgct gaccccctta ttactacaat ataaattttt aaaatcctat |
| 52801 | tcacattttt aatagtctat atcgtgtgtt atgagtataa tgagttcagt gttcttatga |
| 52861 | ttgctctttg catgatattt tttgtcatct ttttactttc aatccattag tatccttgcg |
| 52921 | tctcagcgta tattgggatc acttgtttta atccagtctg agaatctctg cctcttgaat |
| 52981 | ggattttaat ctgctcacat ttaatattat aattggtata attctattta tgtctgccat |
| 53041 | tttaccgttt gttttgtgta tttctcaaat atttttcttt attgctttat tttgcaatga |
| 53101 | atgaatattt tctaaaatat ggaactttag attactaatg aattatttta gtatatattt |
| 53161 | ttgggaattt ttgttgttgt tgtaagttta ccatataggt atatggaaaa ttaattattc |
| 53221 | aaatcatctt ccaatttata ctagtaaact tttagtaata catagaaaca tcattcttat |
| 53281 | acaaatctct tatatttcct ccattttaaa gtattatcac tttacacatt atatctatta |
| 53341 | aagttacaaa gccaacaata cattttagta attactactt taccatctag agtgattacc |
| 53401 | ttatcacaat acatttttct tccaactacc tcctctttga tgttactgga aaatatgtta |
| 53461 | tagatatatt acatttctac atgtcaaata ctcagcaata cattatgagc atattattat |
| 53521 | tattattatt atcattaaga cggagtctcc ctctgtcacc caggctggag tgcagtggca |
| 53581 | caatctctgc tcactgcaag ctccatctcc tggcttcatg acattcttct gctttagcct |
| 53641 | ccggagtagc tgggactaca ggcacctgcc atcacgtcca gctaattttt tgtattttta |
| 53701 | gtagagacag ggtttcactg tgtcagccag gatggtctct atctcctggc ctcgtaatac |
| 53761 | gcccacgtcg gcctcccaaa gtgctgagat tacaggtgtg agccatcctg cctggccatt |
| 53821 | atacgcatat tattttataa acaatttatg ataaagagaa aacatggatt tctactgtct |
| 53881 | tttataatgt taatattacc tataccagtg cttttttaaa aatgtggatt caaacgactg |
| 53941 | gcttgtgtaa cttgctttta gccttaggaa tttattttag tgtttttttt tttttttttt |
| 54001 | tttttttttt ttttttttgt atggtaggtc tgccagcaac accttcagtt aatatttctg |
| 54061 | tttatctggg taagactttg tgttatcttc atttttgaaa aataattgct ggataaggaa |
| 54121 | ttggtggctg acagtttttt ttcctttgca tcttttgaat atattattct actgcctctt |
| 54181 | gccttccatt gtttctgtta agtcagctgt taatcttaca aaacctaggt gttcaaaaaa |
| 54241 | taaacatgtg catgaatatt tatagcagta atattcatac cgtcaaaaag tggaaacaat |
| 54301 | ccatatgctt gtttactcat aaatagacac ccaattttca gctataacaa agaatgaagt |
| 54361 | acttatacat ggtataatat gggcgaaatt tgaaagcatt atgttaagtg cacaagagga |
| 54421 | caaatattac ttgattttat tcacatgaaa caccaggaat tggcaaatta attgggatat |
| 54481 | aaatcagatt agtggtcatt agggctcagg gaagcagaat agggtgtaac aactttatgc |
| 54541 | ataatgggtt tttagaaggg acatgacgaa attttcctgg aacattgtga atatactaaa |
| 54601 | agcaagtgca ttgtgcattg tatgctttaa aatggttgtt attaatttta tattatgtga |
| 54661 | ttttttacct taaaaaacaa aaaagagaaa atagccttac tctatataca ataaattcaa |
| 54721 | gatgtgttac aaatttatat gtgaaatcca aaatagtata atatttaagg aatagctgag |
| 54781 | tagaataaca ctaaaattta acataatgaa atatttcctt aaaaaagaaa aaagcacagt |
| 54841 | aattaaaaag ggaaatatag ttaatatttt ttctctccat taagcatgcc attaactgag |
| 54901 | taaaatatca agctgcaata tgtaaactgc attttctaaa accataaaga aaataagaaa |
| 54961 | tgaaaaggga ttggggaaaa aaatccaaag gtacagtcaa ctacacaaaa aaaccttagt |
| 55021 | ctcattaatc agtatgaaaa tgcaaattgt aactgaaata agataaaact acaattcaaa |
| 55081 | gagaaagcct aaaatttcaa ccccccaaaa attctgggtt ttggagagct gggatggaat |
| 55141 | agggctgcta accttacaac aatgaaagaa ccaaactaac ttcaaagtca tgactttatt |
| 55201 | tttatagtaa ccaggttgcg aagaactgag taaaaatgtg agggaaaaca agcaactgca |
| 55261 | aggagaaaga ggacagatgc acttacatag gacagatgca aatagacacc actatgacaa |
| 55321 | gtaaagctgg aataatcaat aaattcctaa agacaaagtg gggctggtca gattgggaga |
| 55381 | ccgctgacag ctgcagaagt tgggaaagat ccatcatctt gaaaactttt tccccacaaa |
| 55441 | cccactgtga tctctcaagc aattggtaag gaatccaaga cagtctgtat atgatacaga |
| 55501 | tcagggagag cagaacactt gggaggtgac caggtcttgg gggccgagcc cttatgaatg |
| 55561 | ggattagtgc ctttataaaa gaagctcaat ggagttcttg tgtgccttcc actatgtgag |
| 55621 | gacatagaaa gaaggcacca tctatgaacc atgaaatggg ctctcatcaa cactgaattt |
| 55681 | gtgagcatct tgacctgaga acttacagcc tcaagaagtg cgaaaaaaga aatatctgtt |
| 55741 | gctttttagt cacctggttt atgttatttt gttataagag tccaaataga ccaagatatt |
| 55801 | ccattccact taatatgtag gggaagacaa caaaaactgc cacacttaga atactcctga |
| 55861 | tgctgggagt atgaaaacag gaaaaacaaa acaaaactgc tcttgaaggt gaaggaggaa |
| 55921 | tatcactgag ctcaccaaca cagcaggaaa agaacagtga gaaggctaca ttcatgagac |
| 55981 | cctgagaaaa agtacctgca taagactgag atgaaattac ctaccctagt tataattgaa |
| 56041 | atcccaaaaa gaaaagagga aaaaataatg gagcaaaaga aatatttttc aaaataactg |
| 56101 | ccaaaaatat tctaaaagaa gtgacagaaa atcaaacttc agatatagga aactcagaga |
| 56161 | atgtcaaata gaacaaaaat aagaattaca tcttgaaaaa tctttaaaaa atcaactcta |
| 56221 | aattttatat cttgctccaa atatatagag atataaatag gttatcatcg agatatggag |
| 56281 | aaagccatgt catggaaaca ataaaataaa gctgtggaag ggctacattg atattagaca |
| 56341 | caacagagtt cagaacaaga aatagtatca gagttgagaa gtaataagta atataataat |
| 56401 | caattcttaa gaagatgtga acatcctact aattagggta tgcagctaac aacagaacct |
| 56461 | ccaaatacat gaggtaaaac aggaaagaaa tcaaaggtga actagaaaaa tccaaaatta |
| 56521 | tatttgcaga cttcaacact tttgtcttag taatggacag actaggcaaa aactcagtaa |
| 56581 | tcatatggaa gataagaaca acaatatcac caacaagaca tccaatcttc aatggcagat |
| 56641 | actctttcct ttcaagtgaa aaaaaaaaaa aaaacaacaa cagtatggca tattctctaa |
| 56701 | caaacccaga atttctaata tttgcggtct tccttccttc tttccatctt cctttctctt |
| 56761 | ctcttccctt cccttgcctt cttccttcct ttcttctttt cctctttctt ttctctctgg |
| 56821 | ttttctttct tttctttctt ttttctcctt ccttccttct ctccttcttt ctttcctcat |
| 56881 | tctttcttcc ctccatcctc ccttcctttc tccctccctt cttttcttcc ttttctctta |
| 56941 | ttctttcttt ctcactttct tgctttcttt ccttttttct cccttccttc atcccacctt |
| 57001 | ttcttccttc atccctccct ttctttcctc ctttttcctt ccttacttcc ttctttactt |
| 57061 | ccttccttct cctctttatt ttctttgttt cttgcctttt tctcttttaa cattctctct |
| 57121 | tcctcctttc cttcctccct tcctccttcc tttctttatt ctttctttct tgtttctttc |
| 57181 | tttctttctt tctttctttc tttctttctt tctttctttc tttctttctt tctttctctg |
| 57241 | tctctctttc cttcttgtgt tcttgctttc ttttttctcc cttcctgcct ttctcccttc |
| 57301 | ctccctccct cccttccttc tctgatttcc tccttctttt ctttcttctt tctttctttc |
| 57361 | cttcctttgt tctttccttt cttctttttt ctttcttctt ttcttttctt tctttctctt |
| 57421 | tactacaatt catattattt aaaaaattta agagagggag gcagaaaaat aaagaacact |
| 57481 | ttaatctgca ggtaaataga ttatgtctgc tgtatacaaa agaatggcct cccaaaaatg |
| 57541 | ttcatgtcct aattcccaaa gtctaacata caaatatgtt aggttgcatg gcagtgggaa |
| 57601 | attagatttc aagtgaaatt aaggttgcaa taaaatgatg gagagattat cttaaatggg |
| 57661 | tgggatcaat gaaatcacaa gcttccttat aagtgaaaga agaaggcaga agaaaggcaa |
| 57721 | ccatggaggt ggtggcatga gaaattactc aacatcactg acttttaaga tacaagaatg |
| 57781 | aggacccagc gcggtggctc acgcctaatc ccagcacttt gggaggccgg cgtgcgtgga |
| 57841 | tcacgaggtc aggagatcga gaccatgctg gctaacatgg tgaaacccca tccctactaa |
| 57901 | aagtccaaaa aattaactgg gcatggtggc acgtgcctgt agtccaagct actcaggaag |
| 57961 | ctgaggcagg agaatcgctt gaacccagga ggcagaggtt gcagtgagct gagatcgtgc |
| 58021 | cactgcactc cagcctgggc gacagaaggt gactccatct caaaaaaaaa aaaaagatat |
| 58081 | aagaatgagg tcatgttcca aggaataaag gtggcttctg catgctgaaa aaaatcaagt |
| 58141 | acatagattc tgccacagag ccctcagaaa gactgcagcc ctgcccaaaa cttgatgtta |
| 58201 | gccctgtgag tctcatttaa gccttctgag ctccagtact gtaagattac cagtcacttt |
| 58261 | actgtaagat atgaagtttg tggtaattgc ttacaacagc aagaggaagt ttatatagta |
| 58321 | attgtatcac gaaaatgaga accataattt acaactgctt ttaatactgc acttggatgt |
| 58381 | ttgaaatcac gtacatggaa atgatcagta tgtgtatgag ggaagatagc aaattgatgc |
| 58441 | caaaataacg caaatgcaaa tcttacactc atttctatgt aggtttcatt taatctttga |
| 58501 | aattaaaatg aaattaaagg attatgatat tttgatgaaa ttagactaaa atgaacaata |
| 58561 | acaaaataag aacttacata tattccttat atggtcaata atgaagtgat agtggaaaaa |
| 58621 | aacaaggtca aatgaaggtg atgatttagg aagttggaaa gatagcttaa aatacaaaat |
| 58681 | ggtgtataac tagtgaacac ttagacacac tgattgatga acttcagctt ttggcttgat |
| 58741 | gagagcataa aatgagagca gctgaggttt gcaaatttgt aatctgcttg tggaaaaaca |
| 58801 | ggggaaaaca catctcagcc taataagatt tatctactaa agagtcaaga attgatccat |
| 58861 | ttgtccttgt aattcaaaag ctaattcaaa tactgatttg atgtattgtg tgaacaatca |
| 58921 | ttgctgatta tcatcgcata cctggcattc tcttttatct gatatctaaa atatttggta |
| 58981 | attcctggac tttctctttt caaacccagt atggattaat ttcaatctta gaacagttgt |
| 59041 | ctttgagaaa ttcttccctc tactgcatct gtgaatgggc atagcatggt tacctacata |
| 59101 | ctgtcgcccc agagaacatt tgttgaatta aagccaaagt ttaaagcaac agctttaact |
| 59161 | cactggtttt actaatgttt tcctccccat tagccacaac aatattgata ccctcacacc |
| 59221 | ctttaacata aagcttggtg ttgtctattt ttcacgtgct gtcatctata tgatctcagt |
| 59281 | attttaaaaa tcagcttcca gcccatatgg tggctcatgc ttgtaatacc agcagttgaa |
| 59341 | gaggctgaaa tgagaggatt ctttgagccc aggagttcaa gagcaacctg ggcaacataa |
| 59401 | caagacccag tcttcatcaa aagttaaaaa aaaaaaaggt ggccatggtg aggtgcacct |
| 59461 | gttgtcgtag ctatttggga ggccaaggtg gaaggattgc ttgagcttgg gaggttgagg |
| 59521 | ctgcagtgag cagtgattgc accactgcac tgcagcctgg gcaacaaagc aagaccctat |
| 59581 | ctcaaaaaat atatataata aaaataaaaa tcagctctca ttgatttcta cataaatgtg |
| 59641 | aacaggtgat gtccatatag acataaataa taatatatct gacaatggtc catatgatct |
| 59701 | tcaaaatgta aaatgcctat ctgtgtaatt gactggttag tctcattaat gaatatagat |
| 59761 | tcaattctac tttcttgttc tagataaatt atataatcta gcttttcctt tcactcattt |
| 59821 | actgataaca acaggaagaa tgacaagata tctattttgg aaaattactc tggtaggagt |
| 59881 | aaagatgaaa caatgataga attgcatgga aaactagaaa aaagtatggt cttctgatat |
| 59941 | tatatcacat catataataa agccctcata caactcagat attttatcta aaaatgttat |
| 60001 | tttcatctta ggaatgatca cagcatgaga ctagaattgt attacaatga ctctcacaag |
| 60061 | cacatgtgct aaaaaggaga ggaaaacatc attactgata ttttaaacat atgttttact |
| 60121 | ttccatcaac gtgaacctca acttgatatg atgcagattg aaggaaatca cccataattc |
| 60181 | catatgaaga aggcctgtga tattttatgg gaaaataaat agagaaaatg ctaacagaaa |
| 60241 | ccctattaag cattaagctt tatggagcaa agacaaatcc agtggtgaaa gatacacact |
| 60301 | cgagttctgt ttgttgtctt ggaacaatac ggtttagagg tgactggtgg gtgaggagaa |
| 60361 | catatgcgag ttcaccaaac agaaaagctg aatgaggcaa tgcctctttc tgaccatatc |
| 60421 | tcttactcag ataactatat aatttattgt ccagtaaagg gtatatttaa aaatcatatt |
| 60481 | aaaagtcatg caatgaagtt gtccagggaa atcaagactt aagagtctca ctctgacaat |
| 60541 | aatgaatggg gggggttccc tcaagaaaga ctaggacatg actccacact ggcaggtagt |
| 60601 | agtaccagaa aagaacccat ggaaaatctt taccttatgc ttgaggtagg gaccaggcta |
| 60661 | aagtgaaagc cagacataaa attcaatcta aaatatatcc aaaattgaag aaaatatgtg |
| 60721 | ttgtacaggc atagaatgtc tttcctggat cattgaaata gtaagataaa ttcaattttt |
| 60781 | tacattgttt tattttcctc cagttagggc ttgaggtttg tctctggaga gagactgtca |
| 60841 | attggagccc tgcctttctg gggttctggg cagggggttg tggatgctta acatgtgcct |
| 60901 | ttcacaggac acttccttac cccagcagtg gccaggtgtg catcccacga gcaggcctcc |
| 60961 | ctctcacaga aaatctgttg agactaggag atgcctggtg gctgttgcgt gacctgtgtc |
| 61021 | ctgtgtattt ctgacaagag ccactctcag agaccctggc caggaggaga gttaggttcc |
| 61081 | agtgtaggtc agctcagaca catggaggcc acaggaccaa acatgggaaa tcacagaagt |
| 61141 | agttttatta ctcacagatc cagagagaag agggtagctg agaagagggt ttagctgtgt |
| 61201 | ccccagccaa atctcatctt gaattcccac atgttgtggg agggaacagg tgggaggaaa |
| 61261 | ttgaatcatg gggacaggtc tttcccatgc tgttcttctg atagtgaata agtctcacaa |
| 61321 | gatctgatgg ttttataaag gggagtttcc ctgcacaagc tctcttgtct tgtctgctgc |
| 61381 | cacgtgagac ctgcctttca ccttccacca tgattgtgag gcctacccag ccatgtggaa |
| 61441 | ctgtgcacct attaaacctc tttcttctgg aaatcaccca gtcttgggca tgtatttacc |
| 61501 | ggcagtgtga aaatggacta atacagtagc acacctcata gggctgaaca aaatgaggaa |
| 61561 | gataagtggg gagcaagaga gaaaaaagtg gtctgtggga ctccagcctt tattgagccc |
| 61621 | agaacattac ccaaataagt tttccacggg gctctggtca gtggggtgag agccagtagg |
| 61681 | cacatttctt ggctgcagct gcaactgagc aggtcactct ggcgtgtggg ggctgtccat |
| 61741 | gtgggctgtg aggtctgtgg ggtgagtcag gtaggttgta tccaacagtt ccacaacggc |
| 61801 | tagtcaccag gaggaggcag ctgtgtaggg tcaatatctg ggccagccac actgaggaac |
| 61861 | tgtgagggtt agaactggaa atcatcaagg gaatctgaac ccagctacca tatgagagag |
| 61921 | ttcaacttac gttcaatgtg aatgccatgg caatattaaa aggtaagaat tcgctccata |
| 61981 | cgtgtttgag gtaaatagga gaaacctaga atttatgtaa acagtgagaa gattggatgc |
| 62041 | gttttccgtc acatatttta atactagcag catattatat atgtcaatcc atcaggcatt |
| 62101 | cagaagtact tgcttatgaa aactttttgc accatcagac aaaagacaag ggtagaagac |
| 62161 | atttttaacc ctacaaacac tagtaaatta aaaacagaag gacctttatg tcctaatatg |
| 62221 | tctatgttgt gaaaggctgc cctgtgaaat acaggatttc ttaaacatat tttaaaaatc |
| 62281 | atagctgtca atatttttta gaaatccatt taaattttct cttgcttttt tacaattcct |
| 62341 | atttatttat ttagtggttc tgttgatttt gatgtatagc ctaaacttta tatttcttta |
| 62401 | aagtatgttt tatacaactt tatgtaaaat gtttgagtat cttcacgttc tcaccctgtc |
| 62461 | cttttgtttt gctcttatat ggtggccttg agtcttttct ctggcttttc aaacctagta |
| 62521 | agactaagac accaaagtaa ctttgcccgt ggtttcgtaa tgccttctaa agcacatcct |
| 62581 | aagctctcgt gcatacaggg gtctcctttg agctctatgc ttttgagatc ccatatacct |
| 62641 | aaattccagt actccaaatc agtactgctc agttttagtt actaagttta aaaatgtatt |
| 62701 | ttaataacaa gttagtttag ttcactcttg cttctttctt tactgctggt atacatgtat |
| 62761 | attcctttaa ataaatcttg gaatttattt aaaaatttta aattatacta atgaaactgt |
| 62821 | atattgttgt ggattcatag gtgaatttgg aaagaatttg tctttgtgat actaaatcct |
| 62881 | ttttatccaa gaatcatatg tgcctttata tttattccag tctatattta tatcactgag |
| 62941 | taaatatata gaaatgtaga tacatacagc tgtagctata gatagataca aatatagata |
| 63001 | taacatgtta aatctatatc tatcccatat aacatatatg catgttatat gtgtgtgtat |
| 63061 | atatatatat gtttgtgtta ttaaagagct cccttaaaat ttttctttta tttcctatat |
| 63121 | aattttaggt tgagcttgaa ttttctttgt acaaacaagc aaatatttat actagtttta |
| 63181 | atactgaggt ttagacattc tatcttatat tagcattgaa tattttcaca attataaata |
| 63241 | ttatctaata ttaataatgt aacttaaaaa tatttaaaat tttacctttg aattatttta |
| 63301 | ttgttgaatt taaattcctt taagtatgac agtaaatttc tattttatgc tttctctatg |
| 63361 | catatgaaat taatctattc acttctctac ctttatgtag taacatatga aaatcaggcc |
| 63421 | tctgttcttc taatggacat acacatgttt gcatatagaa tatcagactc tttatagtat |
| 63481 | ttaaaatctt taaagacgtg aatatgacct tttaacaaat atattttagc gtgtactgag |
| 63541 | aatcccctat ttatttttta tttgggctaa tcaatatgat tattaatatt attggattac |
| 63601 | caaatttgga atcacacttt catccccaag gtggatattt gttttatttt tttgccaatt |
| 63661 | tcttgtctta ctgtttcaaa tactgttgga tattattttt attttatttg gcattttagt |
| 63721 | atcaatattt gtaagtgatg tactctacat attttttctt caatatctgg tgggttttat |
| 63781 | aattactgct atattggatt tgtagtagac attgagaaaa attattcctg catgttttat |
| 63841 | agctgtatga aggaaactaa tatattttac cccaaaatat atttccttga tatatttcaa |
| 63901 | aatggctatt gagaagggct ggaaatgcaa acatagctgc aaagctgtct tggggagatt |
| 63961 | tgcatcagta gagaatctgc cttgatgcag ccaggctttc tctgagatct gttcccttgt |
| 64021 | ctggatctag gaaagattaa ctgagggtct gaggtctgca aaggtctgaa agaaacattt |
| 64081 | tctgtctatt atctctgagg actgctccca gtgaggtttc acctacgtaa taagtccact |
| 64141 | gttgctagcc agggtccttt tctcacataa cttttttttt tttcctctgt gatccaagac |
| 64201 | cccattcttt ctgtaaactt catgtggtag ttaaacttct gcacccatcg tgtgtctggg |
| 64261 | tcttcattct aagggctcca gtgtacacac attgcagaaa cctgtatgcc ttttctacta |
| 64321 | tttatctgcc tcctgttagt gattttcagg gaaacttcag aaggcaaaag ggacattctc |
| 64381 | ctttagccca tactcagaca aaatccccca acatttaact gattcctaat agcttaaaat |
| 64441 | cactttgaaa actccacata tttataactt ttcttccctc tatgatttct gttcagcttg |
| 64501 | ggttttgttt tttattccat ttacttcatc ctcgaaagac ctattttatg tctatttatt |
| 64561 | ctcatttatt gacattgaga aaagaaaata actttcatgt gagaaacgca agtcctttta |
| 64621 | aataatcagg cccagagaga tattcagatg agacagcagt tctgttctgc tcctctttga |
| 64681 | gctgtgtgtt catctaggct gccgctgttg ccacagtagc tataaattaa ccaataacgc |
| 64741 | cacaccagac actataatcc acacccaata atagtgtaac agtgtatagc cagtcactaa |
| 64801 | taaatgttat ttccataagc caatgagaat ttgtgacaaa cctctttgca tcatcccact |
| 64861 | tcttgtccct tttttgcctt taagaaactg cttgttgcaa agctccaaag ggagttcata |
| 64921 | tccaaggata cttgggtctg ttccttccag gcagctgtcc tcattgtggc tcaagtaaac |
| 64981 | tctttgaatt acgttttgtg cttcagcccc ttccacttag attaacaaca tggatttgtg |
| 65041 | tcaccatgta cagcaattaa aatgtttaca cttttcccct cgagggcact gatgtgtttt |
| 65101 | cctgagcact tggaatagct acttagtgtt tactttctag aatatggttt ctcaaccttg |
| 65161 | gtgctactta cctttaggac cagaggattc tttgttgtgg gaggctgccc tagcaatgct |
| 65221 | aggtgtttcg tttgacctct aaatttcaca cctccaccag tcttgacatc cccacaataa |
| 65281 | ccctagacat tgacaaatgt ctcctgggga aaactccacc agttgacagc caaagttctt |
| 65341 | gaaatattgg aatcgtcaat tgagttttta tgttatccaa aacaaatatt tttctttgtt |
| 65401 | tttaaacatc tacttccatc tacttatcta cttattttta cttttattta taacttaatt |
| 65461 | ccatcaagga gagagagtgc attttgtgtt atgctaaatt tttgaagaat gtattgattt |
| 65521 | tttatggcct gatatatgga tgatatgtag atattacatg tttgtattat caaatttcag |
| 65581 | ggtgataata aaataaatac ttataatatt tatattgtca ctgtatatta gttatttctt |
| 65641 | tcttcactac aggagttttt caacctatag gctatttttc aattctaggt tatccagtag |
| 65701 | attttgaaat gttatgatta aatatctact tctcaagcat tcatctttgc aaaggaatca |
| 65761 | atcccaagct cttataatgc acatcatata aagggcagat tagtcaatat atggttcaga |
| 65821 | aataattatg taatatttat aagaaaatta aaaatttaga tccttaactc agataacaat |
| 65881 | aatccaaatt aaaatttgat ttaattacat aatttaaaat gacaccagaa tactagtaaa |
| 65941 | aatgtagata agtttatata atccttttta gctgtagaac tttattagca taaattcaaa |
| 66001 | tacaggaacc aaagtaagat tgagacctat agtcaaaggt taaaatgtac acattatagg |
| 66061 | ggcatgatta aactaattta aagcatagta acatggagaa atattgcaaa acatacattt |
| 66121 | tactgaatta attgttaata tctaatcatt acatgagaac aaaggtaaag agtagctaca |
| 66181 | cacacacaca cacacacaca caagtgcaat attttcagta aacgtgatgt tcagctacac |
| 66241 | tacaaatcac acctatgttt tctccacaga aaagtaaaga ttaaaaatca caataatatt |
| 66301 | tattgtacat atggaggtaa agatactcaa aatattaccc taaaatactt ttttttttga |
| 66361 | gatggagtct tgcttttatt gcccaggctg gagtgcaatg gcacaatctt ggctcactgc |
| 66421 | aacctcagcc tcccagggtc aagttattct cctagctcag cctcccaagt agctgagatt |
| 66481 | acaagcatgc accaccacac tcggctaatt ttttatattt agtagagacg gggtttcacc |
| 66541 | atgttggtca ggctggtctc gaactcctga cttcaggtga tctacccact tcagcctccc |
| 66601 | aaagtgctgg gattacaggc atgcgcccgg ccaacttttt gacatatttc aagatggcta |
| 66661 | ctcggaagac tggaaatagc ttcttctaca agaatagctg aaaagctgtg tttgttgggg |
| 66721 | agatttgcat ttgtagagaa aatctgcatt gatatagaca ggctttccct gagatactcc |
| 66781 | cttgtctggg tttaggaaag attaactgag tctggcacgt ttacatttct aaaaaccatt |
| 66841 | tcctatcttt acttcccaag aggagggctg ctccctgtga ggtttcatcc atgtaacaag |
| 66901 | accacctctg ctgccaggct cctctttctt ccttgtcgtc acctgccttc tgcaaagcct |
| 66961 | gatttagcaa agtacagctc tgtgttttct gtaacctcaa gacagcatag gcgtgttgac |
| 67021 | taccttgcct ttcctggagt ttttatacat atacagtata tatttgtata tcaatttata |
| 67081 | atatacaaat atttgtatat acatatttat gtatattatg taaactccaa gtgcatactt |
| 67141 | gtgcacgtaa ttatatctgt aaaccttttt tcctgttaat ttgtacatta tcagtttgtt |
| 67201 | tgatagactc aaataattaa agcttcaagg gaaaaattta aactttccta tagagaaaag |
| 67261 | acatatatgt gacaaataat atttagagtg taagacgctt tttaaaggta tatttgcaat |
| 67321 | ttgtgtcaaa acatttaaat atacatttgt tactttataa aatttcaaat aatttaagct |
| 67381 | aaatacatag tatatgcaga aaatttagca atatttgtat gtagcacctt actgtgcatt |
| 67441 | actgtaacca gctgtctaat ataaagaact aattaaggta gtacctactt ttcaaatatc |
| 67501 | gcattttttc acagacctat taaataagac aaataacatt taaactttat ttttaaattt |
| 67561 | gcagaatagt atttttcagc agatggttta ttttagcaaa ttccatcttc acattgtgct |
| 67621 | atgcttttat gagttccagc tgttaacgga taatatttta ctgctgaatc tatcatgtgt |
| 67681 | gatataattg ctcattatgt gccttaaaac acaagcgata tggttatttt caacttggag |
| 67741 | caaattaaaa tcttatcagc aatttaaaaa gtctagagtc gtcttcttct ggttaatttt |
| 67801 | tttaaacttg tatttttctc tttatgtttt tagtgagttg tcttatcaag gagaagaact |
| 67861 | caagctgatt attctttttt tttctcttcc atccacctcg ctggtgtgtg aataatttca |
| 67921 | tttctcagaa aatgttcttt catatccatc ttacaagatg agagaccttt taacatcttc |
| 67981 | cattcggatg tgataccagt aatggaaaat attccagctt catgaatatg gtgatacaaa |
| 68041 | tagttatccg tctaacctct gtcagtgcca aatgtttact ttactcagtg aattactcag |
| 68101 | ctgactggta atttcttctg aaatcactaa tgagaggatc agaggtctgg ctgttgtctg |
| 68161 | tacctcgtat gactcccagt gcagacaatt gtttctatgg agcacagaca gttgaatgga |
| 68221 | ttgacttcct gcctagaata gtttctgctg tgcttcttat ccttcttatg gagatttcag |
| 68281 | attatctgaa ttgcttttct atcttaagaa aaaactcaac aattctccca cctgagagga |
| 68341 | aagtaaactt tagtaagtta gcagaagcaa tccgtaaagt ttttacattg tttgttgtaa |
| 68401 | aatgcagcgt tggtgtctcc atcactaacc ttttctatcc ctcattgctg tttctttgac |
| 68461 | tgcaatagga tacctctagg caaatctgta ttcccgagac agagtgccct ttccgttagc |
| 68521 | tataagtaca ctcaatggta ggctgaaatg atagttttta tctatggtga aatggaatca |
| 68581 | tatcagtgat ttttttaaag gaattttaac tcttgctatg gtttgaatgc ttgccccttc |
| 68641 | caaatctcct gttaaaattt gatccccaat gttgcaggtg gggcttactg ggaggtgttt |
| 68701 | ggtcatgggg atggaacttc atgaatggat aataccctcc cttaggaatc tcaagctatc |
| 68761 | ctccctcctc ggtgccctca ggaatgaatg taccattctt tattcaacta taattccccc |
| 68821 | acccatccct tttgagatat taattaaatg tatgttacac tgctgcatat tgtctcacgt |
| 68881 | atcagtgagt ttctggcttt cttattttag tttacccttt gtcctttagt ttgtaaagct |
| 68941 | tctaattttt ctatatattt tctgatgtta gggtaaaata catgacttat tctatctcat |
| 69001 | ggaattttta tttaaaatat ttatttttca tctatacgtg tcacattttt cattttataa |
| 69061 | cttccatttt tctcctatgt tcaattttca tttaagtact ttgacatata tatgtattta |
| 69121 | tctatatgta tttataaaat atatttactt taaggacctt gaaaattcct tcttctgtca |
| 69181 | tttataaatg gcttattttt atcctgttaa tatatatctt aataatatat atcttctggc |
| 69241 | ttctttgcat gtcagagttt tttttggggg ggtattttga tgttatgcta ttgaatatct |
| 69301 | agattttatt ggctaccttt gaacaatgtt gtggcaggca gttcagtaac ttcaggatga |
| 69361 | gtatttttct gttgttgttt taaatcttct ctttaaactt tgttgagtta gtctagagcc |
| 69421 | atctgtaatt tggagctaaa tgagcactgt cactagggca taacctccag tggtctttac |
| 69481 | tgaatatcct ggaggtacag aggggattcc cttctctggc tggtcagagc taacatgtct |
| 69541 | tcctgtcatg tgacgccagg gaagtgttct tccaactccc tggtagagtc ctttgctgag |
| 69601 | ctccttagaa tttcatccta tgtacatttg gcttagggac ttgggagaaa ccttaggctg |
| 69661 | attattggtt cctttttctg taaacgttct cttctactac acattccagc tgcttaacat |
| 69721 | tttggttttt atctggttcc tcagtgcaat gacaatgtct gctctctctg ggattcctct |
| 69781 | ctactgctgt cacggagaac ctgggaataa agcaggactc attctggctc cttcttttct |
| 69841 | cttgcggagc acagtcctgt gctgcctgat gttcagtatt tcaaaaaaag tttcatatat |
| 69901 | tttgtccagt ttactattct ttaactctaa aagagtaact ccagtcccag ttacagcatc |
| 69961 | atgttctgta actctactcc ttgttgcttc attctgccat tgtctggtat gattgcccct |
| 70021 | ttcccttctg taatcaggcc aagagcataa cataatacta gttataactg cacagcttgc |
| 70081 | ctccgttgtg taaaaaaatc actgagactt aactgtgtcc aactttttaa atgtgaatat |
| 70141 | aagtacaact aaagctatat tttgtttaat atttgcattg catgcttttc cattatttag |
| 70201 | tttcaaaata tgtgaaatat aaatataaat tataaaaact ttaagagagt acatttaaaa |
| 70261 | aatctggtct gattatgttt taactggttt attacaacat gcattcttga attcagggtc |
| 70321 | taatataatt ggtacatttg tctatttgca aaaaaaactt gacaatattt taaaattaat |
| 70381 | ttatccaact cacaacttat atgcttctgc tgttgtatgg aagatgcatt ttaaacttta |
| 70441 | tgagctagca ttctgttata cagtcgatgt ccaattaaat ttctctctat gtttatttct |
| 70501 | ttcattaaaa aaagcgttct tctaactgca aactttcatc agggatcata gctcttctac |
| 70561 | ctgaagaata atctttagta tttcttatcc tgtgggtctg cttgggataa attctttatt |
| 70621 | gtatctttgc ttttgatgga tatgtccacc aagtagacag ttctaggtcg gcacttattt |
| 70681 | tatttcagga cttgaaaggt atcaatacct cacttgttgg ctttcattgt tcatttgaga |
| 70741 | aggttgttat cagtcaactc tttctcttta tagttagccc aattttttta tcaagtgctt |
| 70801 | ttgacatttt tcttttactt ttcagaaatt gtcccatcat gtttctaggt gtgtcctctc |
| 70861 | tgtgtgtttt catttggttt gcaaagcctc ctgaacctgt ggattaatat tattggtcaa |
| 70921 | ttttgataaa acctctaaca ttgccactta aaatgctgtt cagaccagct gttttgtcct |
| 70981 | tcttagattt caacgtgtta gattattact gtatgcttta tattttttaa ataacctttc |
| 71041 | tctacttttt ttttagttgg ttaatctgta ttagtgtatc ttttgctttt ttattttatt |
| 71101 | ttattttatt attatacttt aagttttagg atacatgtgc acaatgtgca ggattgcaac |
| 71161 | ataagtattc atgtgccata ttggtgtgct gcacccatta actcgtcatt tagcattagg |
| 71221 | aatatctcct aatgctatcc ctcccccctc cccccaccac caacagtccc cgaagtgtga |
| 71281 | tgttcccctt ccggtgtccg tgtgttctca ttgttcaatt cccacctatg aatgagaaca |
| 71341 | tgctgtgttt gcttttttgt ccttgcaata gtttactgag aatgatgatt tccagtttca |
| 71401 | tccatgtccc tacaaagcac atgaactcat ccttttttat ggctgcatag tattccatgg |
| 71461 | tgtatatgtg ccacattttc ttaatccagt ctatcgttgt tggacatttg ggttggctcc |
| 71521 | aagtctttgc tattgcgaat aatgccacaa taaacatacg tgtgcatgtg tctttatagc |
| 71581 | agcatgattt atagtccttt gggtatatac ccagtaatgg gatggctggg tcaaatggta |
| 71641 | tttctagttc tagatcccta ggaatcgcca cactgacttc cacaatggtt gaactagttt |
| 71701 | acagtcccac caacagtgta aaagtgttcc tatttctcca catcctctcc agcacctgtt |
| 71761 | gtttcctgac tttttaatga ttgccattct aactggtgtg agatggtatc tcattgtggt |
| 71821 | tttgatttgc atttctctga tggccagtga tgatgaacat tttttcatat tttttggctg |
| 71881 | cataaatgtc ttctttcgag aagtgtctgt tcgtgtcctt cacccacttt ttgatgggat |
| 71941 | tgtttgtttt tttcttgtaa atttgagttc attgtagttt ctgaatatcg gccctttgtc |
| 72001 | agaagagaag gttgcgaaaa ttttctccca ttttgtaggt tgcctgttca ctctggtggt |
| 72061 | agtttctttt gctgtgcaga agctcttttg tttaattaga tcccatttgt caattttggc |
| 72121 | ttttgttgcc attgcttttg gtgttttaga cctgaagtcc tttcccatgc ctatgtcctg |
| 72181 | aatggtattg cctaggtttt cttctagggt ttttatagtt ttaggtctaa catgtaagtc |
| 72241 | tttaatccat cttgaattaa tttttgtata aggtgtaagg aagggatcca gtttcagctt |
| 72301 | tctacataag gctagccagt tttcctgaca ccatttatta aatagggaat ctttccccat |
| 72361 | tgcttgtttt tgtcaggttt gtaaaagatc agatagttgt agttatgtgg cattatttct |
| 72421 | gagggctctg ttctgttcca ttgatctatg tctctgtttg gtaccagtac catgttgttt |
| 72481 | tggttactgt agtcttgtac tatagtttga agtcaggtag cgtgatgcct ccagctttgt |
| 72541 | tcttttggct taggattgac ttggcgatgc aggctctttt ttggttccat atgaacttta |
| 72601 | aagtagcttt ttccaattct gtgaacaaag tcattggtag cttgatgggg atggcactga |
| 72661 | atctataaat taccttgggc agtatggcca ttttcatgat attgattctt ccaacccatg |
| 72721 | agcatggaat gttcttctat ttgtttgtat cctcttttat ttcattgagc agtgttttgt |
| 72781 | agttctccat gaagaggtcc ttcacgtccc ttgtaaggtg gattcctagg tattttattc |
| 72841 | tctttgaagc aattgtgaat gggagttctc tcatgatttg gcactctgtt tgtctattat |
| 72901 | tgttgttcaa gaatgcttgt gatttttgta aattgatttt gtatcctgag acttttctga |
| 72961 | atttgcttat cagcttaagg agattttggg ctgagaaaat gggtttttct agatatacaa |
| 73021 | tcatgtcatc tgcaaacagg gacaatttga cttcctcttt tcataattga atagcctttg |
| 73081 | tttccttctc ctgcctgatt gccctggcca gaacttccaa cagtatgtgg aataggagtg |
| 73141 | gtgagagagg gcaaccctgt cttgtgccag ttttcaaagt gaatgcttcc agtttttgcc |
| 73201 | cattcagttt tctattgact gtgggtttgt tttagatagc tcttattatt ttgagatacg |
| 73261 | tcccatcaat acctaattta ttgagagttt ttagcatgaa gaattgttga attttgtcaa |
| 73321 | aggccttttc tgcatctatt gagataatca tctcgttttt gtctttggtt aggttgatat |
| 73381 | gctagattac atttattgat ttgcatatgt tgaaccagcc ttgcatgaca gggatgaagc |
| 73441 | ccacttgatc atggtggata agctttttga tgtgctgctg gatttggttt gccagtattt |
| 73501 | tattgaggat ttttgcatca atgttcatca aggatattgg tctaaaattc tctttttttg |
| 73561 | gttgtgtctc tgccaggctt tggtatcagg atgatgctgg cctcataaaa tgagttaggg |
| 73621 | aggattccct ctttttctat tgattggaat agtttcagaa ggaatggtac cagttcctcc |
| 73681 | ttgtacctct ggtagaattc ggctgtgaat ccatctggtc ctggactctt tttggttggt |
| 73741 | aagctattga ttattgccac aatttcagag cctgttattg gtctattcca agattcaact |
| 73801 | tcttcctggt ttagtcttgg gagagtgtac gtcttgagga atttatccat ttcttctaga |
| 73861 | ttttctagtt tatttgtgta gaggtgtttg taatattctc tgatggctga ttgtatttct |
| 73921 | gtgggattgg tggtgataac ccctttatca ttttttattg catgtatttg attcttctct |
| 73981 | cttatcttct ttattagtct tgctagtggt ctatcaattt tgttgatctt ttcaaaaaat |
| 74041 | cagctcctgg attcattaat tttttgaagg gttttttgtg tctctatttc cttcagttct |
| 74101 | gctctgattt tagttatttc ttgccttctg ctagcttttg aatgtgtttg ctcttgcttt |
| 74161 | tctagttctt ttaattgtga tgttagggtg tcaattttag atctttcctg ctttctcttg |
| 74221 | tggtcattta gtgctataaa tttccctcta cacactgctt tgagtgtgtc ccagagattc |
| 74281 | aggtatgttg tgtctttttt ttcattggtt tcaaagaaca tctttatttc tgccttcatt |
| 74341 | tcattatgta cccagtagtt attccagaac aggttgttca gtttccatgt agttgagcag |
| 74401 | tcttgagtga gtttcttaat cctgagttct agtttgattg cactgtggtc tgagagacag |
| 74461 | tttgttatga tttcttttct tttacatttg ctgaggagag ctttacttcc aagtatgtgg |
| 74521 | tcaattttgg aataggtgtg gtgtggtgct gagaagaatg tatattctgt tgatttgggg |
| 74581 | tggagagttc tgtagatgtc tattagatct gcttggtgca gagctgagtt caattcctgt |
| 74641 | gtacccttgt taactttctg tttcattgat ctgtctaatg ttgacagtgg gttgtgaaaa |
| 74701 | tctctcatta ttattgtgtg ggagtctaag tctctttgta ggtcactcag gacttgcttt |
| 74761 | atgaatctgg gtgctcctgt attgggtgca tatatattta ggatagttag ctcttctcat |
| 74821 | tgaattgatc cctttaccat tatgtagtgg ccttctttgt ctgttttgat ctttgttggt |
| 74881 | ttaaggtgtg ttttatcaga gactaggatt gcaacccctg cctttttttg ttttccattt |
| 74941 | gcttggtaga tcttcctcca tccttttatt ttgagcatat gtgtgtctct acacgtgaga |
| 75001 | tgggttcctg aacacagcac attgatgggt cttgactctt tatccaattt gccagtctgt |
| 75061 | gtcttttaat tggagcattt agtccattta catttaaagt taatattgtt atgtgtgaat |
| 75121 | ttgatcctgt cattatgatg ctagctggtt attttgctcg ttagttgatg cagtttcttc |
| 75181 | cttgtctcaa tgatctttac attttggcat gattttgcag tggctggtac tggttgttcc |
| 75241 | tttccatgtt tagcgcttcc ttcaggagct cttttaggtc aggcctggtg gtgacaaaat |
| 75301 | ctctcagcat ttgcttgtct gtaaagtatt ttatttctcc ttcacttatg aagcttagtt |
| 75361 | tggctggata tgaaattctg ggttgaaaat tcttttcttt aagaatgttg aatatcggcc |
| 75421 | ccctctctct tctggcttct agagtttctg ccaagagatc cgctgttagt ctgatgggct |
| 75481 | tccctttgtg ggtaacccga cctttctctc tggctgccct taacattttt tccttccttt |
| 75541 | cacctatggt gaatctgaca attatgtgtc ttggagttgc tcttctcgag gagtatcttt |
| 75601 | gtggcattct ctgtatttcc tgaatctgaa tgttggcctg ccttgctaga ttggggaagt |
| 75661 | tctcctggat aatatcctgc agagtgtttt ccaacttggt tccattctcc ccgtcagttt |
| 75721 | caggtacacc tatcagacgt acatttggtc ttttcacgta gtcccatatt tcttggaggt |
| 75781 | ttgttcgttt ctttttattc ttttttatct aaacttccct tcttgcttca tttcattcat |
| 75841 | ttcttcttcc atcacttata ccctttcttc cagttgatca catcggctcc tgaagcttct |
| 75901 | gcattcttta cgtagatctc aagccttggc tttcagctcc atcagctcct ttaagcactt |
| 75961 | ctctgcattg gttattctag atatacattc gtctaaattt ttttcaaagt ttttaacttc |
| 76021 | tttgcccttg gtttgaattt cctcctgtag ctcagagtag tttgatcgtc tgaagccttc |
| 76081 | ttctctcaac tcatcaaagt cattctccac ccagcttttt tccattgctg gtgaggaact |
| 76141 | gcgttccttt ggaggaggag aggtgctctg ctttttagaa tttccaattt ttctgctgtg |
| 76201 | ttttttcccc atctttgtgg ttgtatctac ttttggtctt tgatgatggt gatgtacaga |
| 76261 | tgggtttttg gtgtttatgt cctttctgtt tgtaagtttt ccttctaaca gacaggaccc |
| 76321 | tcagctgcag gtcttttgga gttttctaga ggtccactcc agaccctgtt tacctgggta |
| 76381 | ttagcagcgg tggctgcaga acagcagatt ttcatgaacc gcgaatgctg ctgtctgatc |
| 76441 | gttcctctgg aagttttgtc tcagaggaga acccggccat gtgaggtgtc agtctgcccg |
| 76501 | tactgggggg tgcctcccag ttaggctgct tgggggtcag gggtcaggga cccacttgag |
| 76561 | aaggcagtct gcctgttctc agatctccag ctgtgtgctg ggagaaccac tgctctcttc |
| 76621 | aaagctgtca gacagggaca tttaaatctg cagaggttac tgctgtcttt ttgtttgtct |
| 76681 | ctgccctgcc cccagaggtg gagcctaaag aggcaggcag gcctccttga gctgtggtgg |
| 76741 | gctccaccca gttcgagttc ctggctgctt tgtttaccta cgcaagcctg ggaaatggcg |
| 76801 | agcgaccctc cccaagcctt gctgccgcct tgcagtttga tctcagactg ctgtgatagc |
| 76861 | aatcagcgag actccgtggg cgtgtcaccc tctgagccag gtgcaggata taatctcctg |
| 76921 | gtgcgccgtt tgttaagacc atcggaaaag cacagtatta gggtgggagt tacccgattt |
| 76981 | tccaggtgcc gtctgtcacc cctttctttg actaggaaag ggaactccct gaccccttgc |
| 77041 | acttgccgag tgaggcagtg cctcaccctg cttcggctca tgaactgtgc actgcaccca |
| 77101 | ctgtcctgca tctgctctct ggcactccct agtgagatga acctggtacc tgagatggaa |
| 77161 | atgcagaaat cacccatctt ctgcattgct gacactggga gctgtagacc ggagctgttc |
| 77221 | ctattcggcc atcttggcta cacttggtag tttcttttcc ctctgcttct gggttctgag |
| 77281 | agtttgtcac taacatagga ttccagaaca ctgctgcagg gttctgagtg attgttgctc |
| 77341 | acatgggatt caaaaacact cctgctgggt tcagagtgtt atccctcaca tacgattcca |
| 77401 | gaacactgct atgaggttct gaatgtttgt ccttcacaaa ggattccaga acactgctgc |
| 77461 | tgggttctga gtgtttgtcc ctcatatagg attccagaac actgctgctg ggttctgagt |
| 77521 | gtttgtccct cacataagat tccagaactc tgctatgaag ttctgaatgt ttgtggctca |
| 77581 | cataggattc cagaacactg ctgctgggtt ctgagtgttt gtccctcaca taggattccg |
| 77641 | gaacaatgct gctgggttct gagtgcttgt cccttatatt ggattccaga acaatgttat |
| 77701 | gagggtctga atgtttttcc ctcatgtagg attcaagaac actgctaaga gggtctcaat |
| 77761 | gtttttccct cacaaaggat tgcagaactc tgctgctggg ttctgagtgt ttgtccctga |
| 77821 | tataggattc cagaacactg ctatgagggt ctgaatgttt ttccctcaca aaggattcca |
| 77881 | gaacgctgct gggttctgtt tgtttgtccc ccacaaagga ttccagagca ctgctgctgg |
| 77941 | tttcttagtg tttgttccac acatgattcc agaacacttc tgcgatggtt tgaatatttc |
| 78001 | tccctcagat aggattccag tacacagtgg ctgggttctg agtgttggtc cctcacatag |
| 78061 | gattccagaa cactgcttct gggttctgag tgtttgtcac tcacatagga ttccagaaca |
| 78121 | ctgcttcgag ggtctgagtg tttgtccctc acaaaggatg ctggaacact gctgctggtt |
| 78181 | tctgagtgtt tgtcactcac agaggattcc agaacactgc tgcttccaga acactgctgc |
| 78241 | tgggttctga gtgtttgtcc ctcacatagg attccagaaa actgctatga gtgtctgaag |
| 78301 | gtttgtccat aacaaaggat tccagaacaa tgctgctgga tctgaatgtt tgtccctcac |
| 78361 | acaggattcc aggacactgc ttcgagggtc tgagtgtttg tccctcacac aggattccag |
| 78421 | accactgctt ctgggttctg agtgtttgtt ccacatatag gattccagaa cacagctaca |
| 78481 | aggctatgaa agtttgtctc tcacaaagga tttcagaaaa atgctgctgg gttctgagtg |
| 78541 | tttgttcctc acataggttt ccagaaaact gctgctggga tctgagggat tgtccctgtc |
| 78601 | attgagtacg agaacactgc tgctgggttc tgaaggtttg tccttcactt agaattgcag |
| 78661 | aatactgctg ctaggttatg agggtttgtc cctcatgtag aattctagaa ctctgctgct |
| 78721 | gggttctgag catttctcta tcacatgaga ttctggaaca ctgctaaaat gtaggaatgt |
| 78781 | ttgtccctca caaagagtcc agagcaccgc ttgtgggttc tgagtgtttg tccctcacat |
| 78841 | aggattgcag aacacagctg ctaggttctg agtgtttctc ccaaacatag gattccaaaa |
| 78901 | caccgctcag agggtctgaa agtttcttcc tcaccaagga ttccagaaca ctgctgctgg |
| 78961 | gttctgaaag tttgtccctc acatacgatt ccagaacact gctatgaggc tctgaatgtt |
| 79021 | tgtccctcaa agggattcca gaacactgct tttgagttct gagtgtttgt ccgacacaaa |
| 79081 | ggattccaga acactgctgc tggcttctga gtgtttgtcc ctcacatagg atttcagaac |
| 79141 | actgctatga gggtctgcat gtttttccct cagaaagcat tctgtatcac tgctacgagt |
| 79201 | gtctgaatgc ttgtccctca cataggattc cagaacactg ctactgggtt ctgactgttg |
| 79261 | gtccttcaca taggattcca gaacactgct ccgagggtct gaatgtttgt ccctcacata |
| 79321 | ggattccaga acatttgctg ctggtttgtg agtgtttgtc cctcatatgg gattccagaa |
| 79381 | cacttctgct gggttctgtt tgtccctcat ataggatacc agaacactgc tattggcttc |
| 79441 | agagtgtttg tccctcacat aggattccag aaaacttcta agaggttccg aatgttttcc |
| 79501 | ttcagatagg attccagaac actgctgctg ggttctgaga gtttgtccct cacataggat |
| 79561 | tccagaacac tgctaagagg gtctgaatgt ttgttcctca gataggattc caggacactg |
| 79621 | ctgctgggtt gtgtgtgttt atcactcaca tagaattcca gaacactgct acaagtgtct |
| 79681 | caatgtttgt ccctcacata gaattccaga atattcctgc tgtggtctga atgtttgtcc |
| 79741 | ctcacatatg attccaggac gctgctgctg tgttctgcgt gtttgtcccc cacataggat |
| 79801 | tcaagaacac tcctgctgtc ttctgaacgt gtgtccttca cagaggattc cagaacactg |
| 79861 | ctactagcct ctgaattgtt gtcccccaca gaggattcca gaacactggt actagggtct |
| 79921 | gaatgtgagt ctctcacata ggattccaga acactaatgc cggggtctga atgtttgtcc |
| 79981 | ctcacctagg attgcagaac actgctacga ggttctgaat ctttgtccat cacgtagcat |
| 80041 | tatagaacac tgctacgaag ttctgaatgt ttttccctca gagaggatca aagaacactg |
| 80101 | ctgctagtgt ctgaaatttt gatgatcacg taggattcca gaactctcct gctgtggtct |
| 80161 | gtatgtttgt ctctcacata ggattccaga acactgctac gagggtctga atgtttgtcc |
| 80221 | ctcacaaagg attctagaac actgctgctg ggttctgagt gattgtccct cacataggat |
| 80281 | tccagaacac tgctgctggg ttctgagtgt ttgtccctca cataggattc cagaacactg |
| 80341 | ctacaagggt ctgaatgttt atccctcaca aagggttcca gaacactgtt actggattct |
| 80401 | gagtgtttgt ccctcatatt ggattccaga acaatgctac gagggtctga atatttttcc |
| 80461 | ctcacatagg attcgaaaac actcttacga gggtgtgaat gtttttccct cccaaaggaa |
| 80521 | tccagaacac tgctgctggg ctctgaatgt ttgtccctca tataggattc cagaacactg |
| 80581 | ctacgaggat ctgaatgttt tcccttacaa aggattgtag aacactgcta ctgggttctg |
| 80641 | tttatttgcc cctcacaaag gattccagag cactgctgca tatttcttag tgtttgcccc |
| 80701 | tcacatagga ttccagaaca cttctccaag gttctgaatg tttgccctca gataggattc |
| 80761 | cagtacactg gctggattct gagtgtttgt ccctcacata ggattccaga tcactgctac |
| 80821 | aggttctgaa tgtttgtccc tcacaaagga ttctagaaca ctgctactgg tttctgagtg |
| 80881 | tttgtccctc acaaaggatt ctagaacatg gcttctgggt tctgtgtgtt tgtccctcac |
| 80941 | ataggatgcc aaaacactga tgctgggttc tgagtgtttg tccctcacat agcattccag |
| 81001 | aacactgctg ctggcttctg agtgtttgtc cctcacatac aattccagaa cactgctacg |
| 81061 | aagttctgaa ggtttgtcgc tgacatagga ttccagaaca ctgctgctgg gttctgagtg |
| 81121 | tttgtccctc acataggatt ccagaacact gctacaaggg tctgaatgtt tatccctccc |
| 81181 | aaaggattcc agaacactgc tgctgggttc tgagtgtttg cccctcaaat aagattccag |
| 81241 | aacactgcta tgagggtctg aatgtttttc cctcacatag gattcaaaag actgttacga |
| 81301 | gggtctgaat gtttttccct aacaaaggat tgtagaacac tgtcactggg ttctgtttgt |
| 81361 | aggtccctcc cataggattc cagaacacta atacgagggt ctgaatgttt gtccctcaca |
| 81421 | taggattcca gaacagagct gctgtgtcct gattgcttgt ctctcacaaa ggattccaga |
| 81481 | acactgatgc tgggttctga gtgttcgtct atcacatagg attccagaac aaagctgctg |
| 81541 | ggtcctgatt gtttgcccct cacaaaagat tacaaaacac tgctacgagg gtctgaatgt |
| 81601 | ttgtccctca tataggattc cagatcactg ttgctgggtt ctgagtgttt gtccctcaca |
| 81661 | taggattcca gaacactgct gctgggttct tcgtgtttgt acctcatata ggattccaga |
| 81721 | gcactgctac aagactctga atgcttgtcc cttacatagg attccagaac actgttttga |
| 81781 | gagtctcaat atttgtccct cacaaaagat tgcagacaac tgctgctgag ttctgagagt |
| 81841 | ttgtccttca cttaggaatc cactgattct gggttctgaa tatttgtcct tcacatagga |
| 81901 | ttccagaaca gtgctgctgg cttctgagtg attgtcccgc acgtaggatt ccagaacact |
| 81961 | gttacgaggg tctgaatgtt cttccctcac aaaggcttcc agaacactgc tgctggtttc |
| 82021 | tgtttgtttg tccctcacaa aggattccag agcactgctg ctggttattt agtgtttgtt |
| 82081 | gcccacatag gattccagat cacttctgcg aaggtctgaa tgtttagccc tgagatagga |
| 82141 | ttccagtaca cactggctcg gttctgagtg tttgtaccac acactggatt ccagaacact |
| 82201 | gctgctgggt tctgagtgtt tgcccctcac ataggattcc agaaaactgc tatgaggacc |
| 82261 | ttaatgtttg tccatcacaa aagattctag aacaatgctg ctggatctga gtgtccctca |
| 82321 | cataggataa cagaacactg cttcgagagt ctaaatgttt gtccctcaca aaggattcta |
| 82381 | gaacattgct gctggtttct gagtgtttgt cactcacata ggattccaga acactactgc |
| 82441 | tgagttctga ggctttgtat ctcacatagt atttcagaac actgctatga ggttctgaat |
| 82501 | gtttgaccct cacagagcat tgcagaacag ggctatgggg atctgaatgc ttgtccctca |
| 82561 | catatgaatc cagaacactg ctgcagggtt cagagtgttt atcccacaca taggattaca |
| 82621 | gagcactgtt ctgagcatct gagtgtttga ccctcacaaa ggattgcaga acactgctgc |
| 82681 | tgggctctga gtgtttgtcc cttacatagg attctagaac actgctgctg ggttctgagt |
| 82741 | gtttgtctct cacataggat tccagaacac ttctctgagg atctgaatgt ttgtccctca |
| 82801 | caaaacattc cagaacactg ctgctgggtt ctgagtgttt gtccatcaaa taggattcca |
| 82861 | gaacacggct gatgggctct gtttgtttgt ccctcacaaa ggattccaga gcactgctgc |
| 82921 | tggtttctga atgtttgtcc ctcacatagg attccagaac acttctacga ggctccgaat |
| 82981 | gtttgtcctt cagataggat tccagaacac agtggatgtg tgatgagtgt ttgtccctca |
| 83041 | aataggattc cacaacactg ctttgagggt ctgaatgttt gtatctcaca aaccagtcta |
| 83101 | aaacactact tctgggttct gagtgtttgt ccctcacata gaattctaga acactgcagc |
| 83161 | tcgtttctga gtgtttctcc gtcactttgg attccagaac actgctaaga ttgtctgaat |
| 83221 | gttcgtccct taccaaatat tccagaacag tgctgctggg ttctgagtgt ttggccctca |
| 83281 | cattggtttc cagaacactg ctgtgattgt ctgaatgttt gtccctcaca aattattcca |
| 83341 | gagtactgct gctgggttct gagggtttgt ctctcacata gaattaaaga atactgctgc |
| 83401 | tgagttctga gattttgtac ctcacatatg attccagaac actgctatga gggtctgaat |
| 83461 | atttgttcct cacagagcat tccagaatgg tgctatgagg gtctgaatgc ttgtccctca |
| 83521 | cataggcagg gttctgagtg tttgtccctc acacaggact ccagaacact gctctgagag |
| 83581 | tctgagtgtt tgaccctcac aaaggattcc agaacactgc tgctgggttc tgagtgtttg |
| 83641 | tcccacacat aggattccag aacactgctg ctgctttctt agtgtttgtc tctcacatag |
| 83701 | gattccagaa cactgctgcg aggatctgaa tgttgtccct cacaaaggat tagagaacac |
| 83761 | tgctgctgag ttctgagtgt ttgtccctct cattggattc cagaacactg ctgctaggtt |
| 83821 | ctgagggttt gtccctcaca taggattcca gaacactgct gctggtttct tgggtttgtc |
| 83881 | tctcacatag gattgcagaa cactgctacg attatctgaa tgttgtccct cacaaagtat |
| 83941 | tacagagcac tgctgctggg ttctctctgt ttgcccctca cattggatta cagaacactg |
| 84001 | ctgctaggtt tgagggtttg tccctcacat aggattccaa aacactgttg ctgggttctg |
| 84061 | agtgtttgtc cctaacatac gattccagaa cactgctatg attgtctgaa tgtttgtccc |
| 84121 | tcacaaagta ttccagagca ctcctcctgg gttaagagtg tttgcccttc acataggatt |
| 84181 | ccagaacagt gctgctgggt tctaagtgtt tgtccctcac ataggattcc agaacactgc |
| 84241 | tacgaggatc tgaatgtttg tccctcacaa attattccag agtactgctg ctgggttctg |
| 84301 | agtgtttgtc cctcacatag gattccagaa cactgatacg aaggtctgaa tgtttgtccc |
| 84361 | tcagatagga ttacagaaca cagctacgag gttctgaatg attgtccctc acataggatt |
| 84421 | ccagaacaca gtggctgggt tctgagtgtt tgtccctcat ataggatttc agaacactgc |
| 84481 | tatgaatttc tgaatgtttg tcgctcacag aggattctag aactctgcgg ctgggttgtg |
| 84541 | ttttcccccc acataggatt ccagaatact gctgctgggt tctgagtgtt tgtccctcac |
| 84601 | ataggattcc agaactctcc tgctgggttc tgtttgttta cccctcacaa aggaatccac |
| 84661 | agcactgttg ctggtttctg agtgtttgtc cctcactcag gataccagaa cactgctacg |
| 84721 | atggtctgaa tgtttgtccg tcacaaagga ttcataacac tgctatgggt tctgactgtt |
| 84781 | tgtccctcac aatggattcc agaaaactgc tttgagagtc tcaatgtttg tccctcacaa |
| 84841 | agtattccag agcactgctg cggggttctg tgtgtttgtc cctcacatgg gattcaaaaa |
| 84901 | cactcctgct gggttcagag tgttttccct cacataaaat tccagaacac tactacaagg |
| 84961 | ttctgaatgt ttgtccctca cataggattc cagaacactg ctgctgggtt tcgagtgttt |
| 85021 | ctccctcaca taggattcca gaacactgct gctcggttct gagtgtttgt ccctcacata |
| 85081 | gcattccaga acacaggtac gaagttctga atgtttgtag ctcaagtagg attccagaac |
| 85141 | aatgctgctg ggttctgaat gtttgacact cacacaggat tccagaacac tgctgctggg |
| 85201 | ttctgagtgt ttgtccctca cataggattc cagaacactg cttcgagggt ctgaatgttt |
| 85261 | ttccctcaca aaggactcca gaacactgtt gctgggttct gagtgtttgc ccctcatata |
| 85321 | ggattccaga acaatgctac gagtatctga atgtttttcc ctcacatagg attccagaac |
| 85381 | attgctacga gggtctgaat gtttttccct cacagagtat tccagaacac tgctgctggg |
| 85441 | ttctgaatgt ttgtccctca cataggattc cagaacactg cagctgggtt ctgagtgttt |
| 85501 | gtccctcact ttggattcca gaaaacgtct acgacggtct gaatttttgt ccatcacaaa |
| 85561 | ggattttaga acactgctgc tggatctgag tgtttgtccc tcacacagga ttccagaaca |
| 85621 | ctgcttcgat ggtctgaatg tttgtccctc acaaaggatt ctagaacact gctgctggtt |
| 85681 | tcttagtgtt tgtcactcac ataggattcc agaacactgc tgctgggttc tgagtgtttg |
| 85741 | tcctcacata cgattccaga acactgctat gaggttctga atgtttgtcc ctcacaaagg |
| 85801 | attccagaac actgcttctg agttctgagt gtttgtctgt caaataggat tccagaacac |
| 85861 | tgctgctggg ctctgtttgt ttgtccatca caaaggattc cagaacactg ctataggttt |
| 85921 | ctgagtgttt gtccctcaca taggattcca gaacaattct acgaggctcc gaatgtttgt |
| 85981 | ccttcagata ggatttcaga acacagtggc tgggttctga gtgtttgtcc ctcacatagg |
| 86041 | gtatcagaac actgctgctg ggatctgagc gtttgtcttt cacagaggat tccagaacac |
| 86101 | tgctgctttg ttctgagtgt ttgtccctca cataggattc cagaacactg ccgctcggta |
| 86161 | ctgagggttt gtcccttaca tagaattcta gaacactgca gctcatttct gagtgtttgt |
| 86221 | ccctcactta ggattccaga acaatgctac gattgtctga atgtttgttc cttaccaagt |
| 86281 | attccagaac actgctgctg ggttctgagt gtttggcact cacattggtt tccagaacac |
| 86341 | tgctacgagg gtctgaaaat ctcgcacata ggattccaga acactgctaa gatggtctga |
| 86401 | atgtttttcc ctcagaaagg attctggaac cctgctactg gattctgttt gtttgtctct |
| 86461 | tacaaaggat ttcagagcac tgctcctggt tgctgagtgt ttgtccctca caaaggattt |
| 86521 | cagagcactg ctcctggttg ctgagtgttt gtccctcaca taggattcca gaacacttct |
| 86581 | acgagtgtct gaatgtttgt ccctcagata ggattccaga agacagtgga tgggttctgg |
| 86641 | gtgtttgtcc atcacatagg attccagaac actgctgctg ggttctgagt gtttgtccct |
| 86701 | cacataaggt tccagaacac tgcttctgag tgtttgtccc tcacatagga tcccagaaca |
| 86761 | ctgttgctgg gttctgagta tttgtccctc tcatgggatt ccggaaacct gctgctgagt |
| 86821 | tcagagtgtt tttccctcac ataggattcc agaacactgc tgctgggttc tgagtgtttg |
| 86881 | tccctcacat tggattccag aacactgctg ctgggttttg agtgtttgtc cctcacatag |
| 86941 | aattc |

[0404] An exemplary human KRT8P8 nucleic acid sequence is set forth below (SEQ ID NO: 168; GenBank Accession No: NG_009749.1, Version 1, incorporated herein by reference):

```
      1 acccacagaa tcaaaaaact cagtgaatca taaacaggat aaataaaaag aaaaccacac
    61 ctaggcacat catagtcaag ttgttaaaaa aaacaaagag accaagaagc agcttctctg
  121 ctccttctgg aatctctgcc tggttcagcc cacctgcctc cactcctgcc tccaccatgt
  181 ccatcagggt gacccagaag tcgtacaagg tgtccacctc tggcacacgg gccttcagca
  241 gccgcttcta cacgagtggg cccggtgccc gcatcagctt ctccagcttc tcccgagtgg
  301 gcagcagcag cttctggggt ggcctgggcg gaggctatgg tggggccagc ggcatcggag
  361 gcatcaccgc cgtcatggtc aaccagagtc tgctgagccg ccttaacctg gaggtggacc
  421 ccaacatcca ggccgtgcgc acccaggaga aggagcatat caagacccta ggcaaatttg
  481 tctccttcat cgacaaggta ccgttcctgg agcagcagaa caagatgctg gagaccaagt
  541 ggagcctcct gcagcagcag gagatggctc agagcaacat ggacaacatg ttcgagagct
  601 acatcaacaa ccttaggcgg cagctggaga ctctgggcca ggagaagctg aagctggaga
  661 cggagcttgg caacattcag gggctggtgg aggacttcaa ggacgagaat gaggatgaga
  721 tcaatatgcg taaagagatg gcaaatgaat ttgtcctcct caagaaggat gtggatgaag
  781 ctgacatgaa caaggtagag ctggagtctc gcctggacgg gctgactgac gagatcaact
  841 tcctcaggca gctgtatgaa gaggagatcc gggagctgca ttcccagatc tcggatacgt
  901 ctgtggtgct gtccgtggac aacagccctc cctggacatg gaaagcatca tcgctgaggt
  961 caaggcgtag tacgaggtga tcgccaaccg cagcctggct gaggctgaga gcatggacca
1021 ggtcaagtat gaggagctgc aggtgctggc tgggaagcag ggggatgacc tgcggcatac
1081 agactgagat ctccgagatg aaccggaaca tcagctggct ccaggctgag actgagggcc
1141 tcaaaggccg gatggcttcc ctgtggaggc cgccatcgca gatgccgagc agcttgggga
1201 gctggccgtt aaggatgcta acgtcaagct gtccgagctg gaggccaccc tgcagcgggc
1261 caagcaggac atggcgaggc ggctgcgtga gtaccaggag ctgatgaacg tcaagctagc
1321 cctggacatc gagatcgcca cctacgggaa gctgctggag ggcgaagaga gccagctaga
1381 gtctgggatg cagaacatga gtattcatat gaagaccacc agcggttttg caggtggtct
1441 gagctcggcc tatgggggcc tcacaagccc cggcctcagc tacggcctgg gctccagctc
1501 tggctctggc gcgggcttca gctccttcag ccgcaccagc tccaccaggg ccccggttgt
1561 gaagaagatc gagacccgcg atgggaagct ggtgtccgcg tcctctgacg tcccgcccaa
1621 gtgaacagct gcggcagccc ctcccaccct gcccctcctg cgacttgccc agagcccggg
1681 agggaggccg ctgtgcaggg gagcacaggg aacagaagac acacctgagg ctcggctcta
1741 gccctcagcc caccctcggc ggaattcact gcctgaggac cacccttgcc catgcctcca
1801 actacaaaac aattcaattg cttt
```

[0405] An exemplary human miR218-1 nucleic acid sequence is set forth below (SEQ ID NO: 169; GenBank Accession No: NR_029631.1, Version 1, incorporated herein by reference):

1 gtgataatgt agcgagattt tctgttgtgc ttgatctaac catgtggttg cgaggtatga
61 gtaaaacatg gttccgtcaa gcaccatgga acgtcacgca gctttctaca

[0406] An exemplary human XIST nucleic acid sequence is set forth below (SEQ ID NO: 170; GenBank Accession No: U50908.1, Version 1, incorporated herein by reference):

```
      1 aagcttggct cccttgaggt taggaattcg ataccagcct ggcaagcatg gtgaaccccg
    61 tctctgctaa aaatacaaaa attagccagg catggtggca cacgcctgta atcccagcta
  121 ctcgggaggc tgaggcagga gaatcacttg aacccgggag gcagtggttg tagtgagccg
  181 agattgtgcc actgcactct ggcctgggct acagagtgag actctgcctc aaacaaaaaa
  241 caatcaaaca aaaaccaaat agcaaacaga tatatgaaaa agtgctcaat atcaataatc
  301 atcacaaaaa tgcacatcag gctgggtgtg gtggctcaca cctataatcc cagcactttg
  361 ggaggccaaa gcgggtggat cacttgaggt caggagttca agaccagcct gcccaatata
  421 gtgaaacatc ttctctgcta aaaatacaaa aattagctgg gcatggtggt gggtgcctgt
  481 aatcccaccc gctcaggagg ctgaggcagg aggatcactt gaacccggga ggcagaggtt
  541 gcaatgagcc gagatggcac cactgcacgg gctgtaacct gggcaacaga atgaggctgt
  601 gtctgaaaac agaaataaat aaggccaggc gcagtggttc acatctgtaa tcccagtgtg
  661 attacagatc acactgtggg aggccaaggc aggcagatca cctgagctca ggagtttgag
  721 accagcctgg tcaacatggt gaacccccgt ctctattaaa aatatacaaa ttagctgggc
  781 atggtggcag atgcctataa tccaagctac ttgggaggct gaggcatgag aattgcttga
  841 acccaagaag tggaggttgc agtgaaccgt gatcacacca ctgcactcca gccttggcga
  901 cagagagaga ttctgtctca aaaaaataaa aattaaaaaa aaaaaagaaa gaaagaaaaa
  961 aaaaagaaaa atgcaaatca aaaccacaat gcaatattgc ctcacacctg ttagaatggc
1021 tattttcaag aagacaaaag ttaaggattg gtgagggtgt ggagaaaagg gaacatttat
1081 acagtgttgg tggaaatata aattagttca accatcatgg aggcttctga aaacactaaa
1141 aatacaacta ccttatgatc caataatccc acttgtgggt gttgttcaaa gaaattgaaa
1201 tcagtgtgtt gaagagacat ttgtcctcct atgtttatta tagcattatt cacaatagtc
1261 aagatatgaa atcaaggtaa gtccccatca acagatgaat gtataaagaa aatgtggtat
1321 acatacacaa tggaacacta gtcagcctta aaaagaagga aaatctgtca tttgcaacaa
1381 catatatgaa cctggaggac attatgctaa gccaggcaca gaaagatgaa tactatatta
1441 tctcacttgt atgtgtaatt ttcaaaactt gaacttgtag ggagtagact ggtggttaat
1501 aatctgaagg gagggtaaaa atgtgttgat caaaggataa aaattttagt tagagagaag
1561 gaataagttt ttgagatata ttgcagagca tgatgacaat agtgataagg tattgtacat
1621 ttcaaaaact gctaagtaaa ttttaagtat tctcatcaca aaataagtat gtgagctgag
1681 atatatagta attagcttga tttaattatt ctacaatgca tgcatatatc aaaataccac
1741 attttactcc atgaatatat acaattattt gtgaactaaa aatacatttt gaaaaagaac
1801 tactagaaaa actaaaaatg agaaaataaa taagcacatt aattaattaa ttaaaatcct
1861 tgtctagtaa gtttaatgtt ggtactttct cagggaccat tttttgttaa ttaccttttt
1921 ttctatatat tagctataat ttcctgtttt ttgtatgcct tgtaattttt aataaaaatg
1981 aacagtttta atattataat gtgatacctt gggaaataaa attcctccct ctccctagtg
2041 tttgctggtg attttttttt ttttttttga gatggagtct tgctctgtca ccaggcttgg
2101 cgcggtctca gctcactgca acctccgcct tccgggttca agcgattctc ctgcctcagc
2161 ctcccgagta gctgggatta caggcgtgtg ccaccatgtg cagcttattt ttgtatttat
2221 agtagagatg gggtttcacc atattgacca ggatggtctt gatttcctga cctcatgatc
2281 tgtctgcctc gcctccaagt gctggattac agcatgagcc accgcacccg ccactggtga
2341 tgttttaata gattgtaatt tttttgaggt agcgtttgct ttctcaccca gtctggagtt
2401 cagtgggcca atcacaagcc cactgtatcc ttgaactact gggctcaatc aatcctcctg
2461 cttcatcctc ctgagaagct agaactacgg gtatgcacca ccacgcctgg ctaattttta
2521 tattttttat ttttgtagag acagaggtct ctctattttg cccaggctga tctcgaactc
2581 ctggcctcaa aagatcctcc tgccttggcc tcctaaagtg ctgagattaa aggtgtgagc
2641 caacgtaccc agcccattta cagtattttt aatgttgacg tgagctatgt atacaattgt
2701 taagcatata ctcactgagc tttaatatgt ataaccccgt gttctctttt gataaactag
2761 aaaacctttc ccaacatcct aatacacttt tgaaggatat cataaatagt gtgtttgagg
2821 gctagaggaa tggcccaagt actgtgatga ggttcatagg atttggggct atttggaaga
2881 cccttacaag gcatatagca caacttttct atctgttgat tgtctctgta gcatcctcac
2941 aaaatccact attggcttgc aggtcttcag agactggcat tcaccagttc tggaggtgtt
3001 aactgttcca tctttggaca gctcagagta ttcagacgtc tttatttatt agaactacac
3061 acaacaggac tattcatcaa cttcccccat tgcagacagc cctttgagtt gtaaagagcc
3121 cttccccagg tcttttattt tcttttccat aatatgtcct ggtcccttta actgcttttc
3181 actggtgatg atttggaggg cccccaccag cctgctaatt agatcctgaa ggctttatca
3241 aagtcctctt taaatggcat agccctgaag ccaaggacag actcctgttt agtgggggga
3301 ggggctcttc aaattagagg gggttgagca cttttctttg accctttctt ctgatactga
3361 ccttgtatga atcagacttt ccccccttta tatcagattc tggtcctgcc ctgtatacaa
3421 ctttggctcc tttcctgcag acaggctcag tgcttctttg gtgattttat gctgccatct
3481 ggtggctaag tcgacagtgc cggctttttt tgggcctaat ttagcagagg agaggatgta
3541 cagatgaaca tagtgacaat cctagaactg gaataatctg aatctttaaa aagaggacct
3601 gatttcttcc tattgtgtgc catgtgattg ggagcccaaa gaagaggatg ctaacacagc
3661 tatggcatgg ccacagaaaa tatgcctgaa atatccccat cagagcccaa ctcttactag
3721 ctaattgact ttgagcaagt cacttttcct tctagtgtct cagtttccat acttctgatc
3781 ctaacaggtt tataaaatgg agccaagcag tagtgaaggt gaggccaggt cgggaagagg
3841 aggaagtaaa gtgaattgaa agctagtgag ggcaggggag taagtaaaac ctgaaggtga
3901 taaatggcag aagagggcag gactgctcta gggcaaaggc ctaggcaaat atttttcaga
3961 agttcctttt aatgtaaaca gtttgattaa aaatatatta caaatacatg ggcccatgtg
4021 aggtgtagtg atttatcaat gaaaatttag aataccaggt ggagaagaga tgcttacgta
4081 tttgtttatt caacagttca catatcaatt tttataatga ccttgcacca tatcttcctt
4141 tttaggtcca gaaatcatct ctttgtgttt attgtcaaat gcaccattcc tggctaattt
4201 cacatctccc tctatgagaa aaacatagca acactgtact acttccattt ttgcaatggc
4261 actctggaac ctctttgtat tgaaattata aatttcttgc ttttgcagtt tctttagcct
4321 aagggtcaac agtggattta ggtaggccac agctctgaac atgtcctgtg tccaatgtga
4381 gtgtcacccc ataacggcac atcagcacca ttttgcatgc ctagccttaa gagttaccat
4441 ttaaaaaact ccaatgacaa ccaatgagag tgatctgcta gcgtggctgc ccacctggaa
4501 ccagggcctg gtcacagaaa cccaggacaa ccagtttata aattgtcttt ttggcttttt
4561 atttgaaaag gtatttttgt gaaacaaaag gttttaattt cagagtcaaa tttatcaatc
4621 tttcatattt gatgctactt gagtctttag aaaatttttc cccaactaaa tttctttttt
4681 ctttttttga gatggagtct tggtctgtcg cccgggctgg agcgcagtgg caccatctcg
4741 gttcactgca acctccgcct cctggattca agtgattctc ctgcctcagc ctcccaagta
4801 gctgggatta taggtgcctg ccaccatgcc cggctaattt ttgtatttat agtagagacg
4861 gggtttcgct atgttggcca ggctggtctc aaactcctca cctcaggtga tccagccacc
4921 tcggcctccc aaagtgctgg gattacaagc atgagccacc gcgcccggcc aaccaaattt
4981 cttaaaagta tagaacattt ccacacttgt agaaacttct agtagataaa gttgtattag
5041 aggtttggta atccagtctt tctgatagct gcttcatagg tgtcactgta ggtagtttct
5101 ctctttgtta agcattgttt tcctcaaagg taccattgta ttgcaccact ttacaataca
5161 ataaccctca tttggaatga caagtcagat tacttttttt gtttgatcca aggacactta
5221 gaagatggaa ggtatttctt aaggaagaaa atttgcatac tttattattt ttctggaaac
5281 tgaagagcaa gcttacctga tagatttggg tcgatagtta cactttccag ttcagccagt
5341 gggagggtaa tgtatccttt gactttctag aagttgctct ataatactta agttgccatt
5401 gtctcccttc tggttctctg ttgtttctcg aatgacatag aagagtttat gagattaatt
5461 gcttcctact gaaatagcca ggtttctgag ggcagctttg gcttttatat gagctttttc
5521 ttcctaccac ttatcagtta ctgacagagg gtcaacttca ctactgtgtc atatggttgg
5581 tccaatgttg ggttcctcag attcatggag gaaataggaa aatagtaaag attaaggagt
5641 catagttaaa aaattacaaa caggtcacaa accagtactc tttcttgatt atttaggaac
5701 caaatagcca ttctatgaaa tgtcttcctt tcctttttct ctcttgctca ccaattgact
5761 cgtaagcact tccgttctct tatggttggg agccatacaa ggtagagtgt tggagtaaaa
5821 actacattga ctctgaatca tggtgtgtga cctcgggcac atgatgtaac ctctatagga
5881 ctctatttta atgtataaaa caggaataat cctttattat tatctatgca atacatattc
5941 cattatctat tacatgggat aatggaatgg gaagtccctt gaagatggta ctaacctcaa
6001 tgtattactc ctttctagct tctttgggtc aaaagtttgg tggaggagtt acaaattctg
6061 gtttgaatga tatatttgga tactttatca acacatcaaa gctctaccta tcccttcccc
6121 cattctcaaa accaagctga attaacatct ttacatttat tatgcagttt atggaggatt
6181 ttagcattaa ttattgcttg atttactcaa tgtccccatg ttatagatga gaactggaaa
6241 acccattgaa gttgtgactc ctggtctaga aatgaagtct acttccagtt aatgttcttt
6301 ctggtatgtc tttgctttct tgaaatttcc cttttttgtc cttactgggt aaattttgaa
6361 ccaaccaaat cacaaagatg tccggctttc aatcttctag gccacgcctc ttatgctctc
6421 tccgccctca gccccccctt cagttcttaa agcgctgcaa ttcgctgctg cagccatatt
6481 tcttactctc tcggggctgg aagctt
```

[0407] An exemplary human PSG10P nucleic acid sequence is set forth below (SEQ ID NO: 171; GenBank Accession No: NR_026824.1, Version 1, incorporated herein by reference):

```
      1 gcagaaggag gaaggacagc acagcctaca gccgtgctca ggaagtttct ggaacctagg
    61 ctcatctcca cagaggagaa cacacaagca gcagagacca tggggcccct ctcagcccct
  121 ccctgcacac agcacatcaa atggaagggg gtcctgctca cagcatcact tttaaacttc
  181 tggaacccac ctaccattgc ccaagtcacg actgaagccc agccacccaa agtttccgag
  241 gggaaggatg ttcttctact tgtccacaat ttgccccaga atcttactgg ttacatgtgg
  301 tagaaagggc aaataaggga cctctaccat tacattacat catatgtagt agacggtcaa
  361 agaattacat atgggcctgc atacagtgga cgagaaacag tatattccaa tgcatccctg
  421 ctgatccaga atgtcacccg ggaggacgga gtatcctaca ccttacacat catacagcga
  481 ggtgatggga ctagaggagt aactggaaat ttcaccttca ccttataccc gaagctgccc
  541 aagccctaca tcaccatcaa caactcaaaa cccagggaga ataaggatgt cttacccttc
  601 acctgtgacc ctaaaagtga gaactacacc tacacgtggt ggctaaatgg tcagagcctc
  661 ccagtcagtc ccagggtaaa gtgacccatt gaaaacagga tcctcattct acccagtgtc
  721 acgagaaatg aaacaggacc ctatcaatgt gaaatacggg accgatatgg tggcatccgc
  781 agtaacccag tcaccctgaa tgtcctctat ggtccagacc tccccagaat ttacccttca
  841 ttcacctatt accgttcagg acaaaacctt tacttgtcct gcttcgcgga atgtaaccca
  901 ccggcatagt actcttggac aattaatggg aagtttcagc aatcagaaca aaagctcttt
  961 atcccccaaa ttactacaaa gcatagaggg ctctatgctt gctctgttcg taactcagcc
1021 actggcaagg aaagctccaa atccatgaca gtcgaagtct ctggtgcctg ccatggagac
1081 ctggcagggt ctcattcgtg actgccataa cagagacact gagaaaaaga tgcaaccatg
1141 gaaaggtgca aaggtggcaa gttctaatga catagaaaat agcaatcagc ctttctcaca
1201 tctgaaagcc ttccaaaata tctgagtgca gtagagaatt gacagaggac tgatcaccaa
1261 cctagaagta tgctcctcca ggaataggac gtcttccttt ctttactcca atagagcagc
1321 ggtgatgtca tttctgtatt tcaggaagac tggcaggaga tttatggaaa agactctgac
1381 aaggactctg gaatacaagc tcctgataac ttcaagatca taccactgga ctaagaactt
1441 tcaaaatttt aatgaacagg ctgatacctt catgaaattc aagacaaaga agaaaaaaaa
1501 ctcaatttta ttggaataaa taatcaaaag gataatgttt tcataatttt ctatttgaaa
1561 atgtgctgag tctttgaatg ttttattctc cagatttatg aacttttttc cttgaacaat
1621 tggtaaagta tacttttgta aacaaaaatt gaaacatttg cttttgctga gtgccccaga
1681 attgggaaac tattcatgag tattcatatg tttatggtaa taaagttatt tgcacaactt
1741 ca
```

[0408] An exemplary human miR1262 nucleic acid sequence is set forth below (SEQ ID NO: 172; GenBank Accession No: NR_031664.1, Version 1, incorporated herein by reference):

1 atctacaatg gtgatgggtg aatttgtaga aggatgaaag tcaaagaatc cttctgggaa
61 ctaatttttg gccttcaaca agaattgtga tat

[0409] An exemplary human RP11-360D2.1 nucleic acid sequence is set forth below (SEQ ID NO: 173; GenBank Accession No: HG492934.1, Version 1, incorporated herein by reference):

```
    1 agctgtcttc ttcgtcttat ttgttttgtc tgtgcattac ctgtggaaga aatggaagaa
  61 acaccaaaaa aagctgaaaa agcaagcctc cttagaaaaa cctggtaatg atctagaaag
121 cccattgatc aacaacattg accaaacact ccacagagtg gcaaccacag catcagtgat
181 atacaagatc tgggagcaca ggtctcacca tccttcctct aagaaaatta agcactgcaa
241 attaaagaag aagagtaaag aagaaggagc cagaagatac taaataaatg catatgcaaa
301 tgtagcttag tcaattatag atatcacaaa agaaatctat catctaagga ttaaaaattg
361 ttctttggaa acctttataa a
```

[0410] An exemplary human RP11 amino acid sequence is set forth below (SEQ ID NO: 174; GenBank Accession No: NP_056444.3, Version 3, incorporated herein by reference):

```
    1 msladellad leeaaeeeeg gsygeeeeep aiedvqeetq ldlsgdsvkt iaklwdskmf
  61 aeimmkieey iskqakasev mgpveaapey rvivdannit veienelnii hkfirdkysk
121 rfpeleslvp naldyirtvk elgnsldkck nnenlqqilt natimvvsvt asttqgqqls
181 eeelerleea cdmalelnas khriyeyves rmsfiapnls iiigastaak imgvaggltn
241 lskmpacnim llgagrktls gfsstsvlph tgyiyhsdiv qslppdlrrk aarlvaakct
301 laarvdsfhe stegkvgyel kdeierkfdk wgepppvkqv kplpapldgq rkkrggrryr
361 kmkerlglte irkganrmsf geieedayqe dlgfslghlg ksgsgrvrqt qvneatkari
421 sktlqrtlqk qsvvyggkst irdrssgtas svaftplqgl eivnpqaaek kvaeanqkyf
481 ssmaeflkvk geksglmst
```

[0411] An exemplary human RP11 nucleic acid sequence is set forth below (SEQ ID NO: 175; GenBank Accession No: NM_015629.3, Version 3, incorporated herein by reference):

```
      1 tagtttcctg tttccggctt cgcttcggcc cacccccacg tccaccccga atccctgctt
    61 aaaggccttg ctttcttgtc taacgccgca accagtcctc tgagttgcca acgtctttct
  121 tcttgtctcg acgccccgtc gtccggccac agcgattctc tgcttagcag gatcggtcca
  181 cagcgggacg tgagtccctt tcctcctcgc ggcttaccgc ctctctccgc ctagtgccag
  241 gtgctaataa agttgttgtt tcaaatgcgg ccaggaacat cgcgagcggg gaccaatcag
  301 agagtagctt tgcctctata acggcgcgag agtgagacgt catcggtgag cgactaacgc
  361 tagaaacagt ggtgcgcgga gaggagaggc ctcgggatgt ctctggcaga tgagctctta
  421 gctgatctcg aagaggcagc agaagaggag gaaggaggaa gctatgggga ggaagaagag
  481 gagccagcga tcgaggatgt gcaggaggag acacagctgg atctttccgg ggattcagtc
  541 aagaccatcg ccaagctatg ggatagtaag atgtttgctg agattatgat gaagattgag
  601 gagtatatca gcaagcaagc caaagcttca gaagtgatgg gaccagtgga ggccgcgcct
  661 gaataccgcg tcatcgtgga tgccaacaac ctgaccgtgg agatcgaaaa cgagctgaac
  721 atcatccata agttcatccg ggataagtac tcaaagagat tccctgaact ggagtccttg
  781 gtccccaatg cactggatta catccgcacg gtcaaggagc tgggcaacag cctggacaag
  841 tgcaagaaca atgagaacct gcagcagatc ctcaccaatg ccaccatcat ggtcgtcagc
  901 gtcaccgcct ccaccaccca ggggcagcag ctgtcggagg aggagctgga gcggctggag
  961 gaggcctgcg acatggcgct ggagctgaac gcctccaagc accgcatcta cgagtatgtg
1021 gagtcccgga tgtccttcat cgcacccaac ctgtccatca ttatcggggc atccacggcc
1081 gccaagatca tgggtgtggc cggcggcctg accaacctct ccaagatgcc cgcctgcaac
1141 atcatgctgc tcggggccca gcgcaagacg ctgtcgggct tctcgtctac ctcagtgctg
1201 ccccacaccg gctacatcta ccacagtgac atcgtgcagt ccctgccacc ggatctgcgg
1261 cggaaagcgg cccggctggt ggccgccaag tgcacactgg cagcccgtgt ggacagtttc
1321 cacgagagca cagaagggaa ggtgggctac gaactgaagg atgagatcga gcgcaaattc
1381 gacaagtggc aggagccgcc gcctgtgaag caggtgaagc cgctgcctgc gcccctggat
1441 ggacagcgga agaagcgagg cggccgcagg taccgcaaga tgaaggagcg gctggggctg
1501 acggagatcc ggaagcaggc caaccgtatg agcttcggag agatcgagga ggacgcctac
1561 caggaggacc tgggattcag cctgggccac ctgggcaagt cgggcagtgg gcgtgtgcgg
1621 cagacacagg taaacgaggc caccaaggcc aggatctcca agacgctgca gcggaccctg
1681 cagaagcaga gcgtcgtata tggcgggaag tccaccatcc gcgaccgctc ctcgggcacg
1741 gcctccagcg tggccttcac cccactccag ggcctggaga ttgtgaaccc acaggcggca
1801 gagaagaagg tggctgaggc caaccagaag tatttctcca gcatggctga gttcctcaag
1861 gtcaagggcg agaagagtgg ccttatgtcc acctgaatga ctgcgtgtgt ccaaggtggc
1921 ttcccactga agggacacag aggtccagtc cttctgaagg gctaggatcg ggttctggca
1981 gggagaacct gccctgccac tggccccatt gctgggactg cccagggagg aggccttgga
2041 agagtccggc ctggcctccc ccaggaccga gatcaccgcc cagtatgggc tagagcaggt
2101 cttcatcatg ccttgtcttt tttaactgag aaaggagatt ttttgaaaag agtacaatta
2161 aaaggacatt gtcaagatct gtcaaaaaaa aaaaaaaaaa a
```

[0412] An exemplary human RP1 amino acid sequence is set forth below (SEQ ID NO: 176; GenBank Accession No: AAA20120.1, Version 1, incorporated herein by reference):

```
    1 mqkwfsafdd aiiqrqwran psrggggvsf tkevdtnvat gapprrqrvp gracpwrepi
  61 rgrrgarpgg gdaggtpget vrhcsapedp ifrfsslhsy pfpgtiksrd mswkrhhlip
121 etfgvkrrrk rgpvesdplr gepgsaraav selmqlfprg lfedalppiv lrsqvyslvp
181 drtvadrqlk elgeggeiri vglgfdldah giiftedyrt rvlkacdgrp yagavqkfla
241 svlpacgdls fqqdqmtqtf gfrdseithl vnagvltvrd agswwlavpg agrfikyfvk
301 grqavlsmvr kakyrellls ellgrrapvv vrlgltyhvh dligaqlvdc isttsgtllr
361 lpet
```

[0413] An exemplary human RP1 nucleic acid sequence is set forth below (SEQ ID NO: 177; GenBank Accession No: NM_006269.1, Version 1, incorporated herein by reference):

```
      1 gacatactga gaataaatcc aaagacatta gtttctttgc acgaaatgag gttacatatc
    61 cagtgacatt tatttgagct atttaaacaa cttaaacatc tttttctttt cttaataagg
  121 gacgtttcaa gttgtggtct cagccaaaat gagtgatacc ccttctactg gtttttccat
  181 cattcatcct acgtcttctg aaggtcaagt tccaccccct cgccatttga gcctcactca
  241 tcctgttgtg gccaagcgaa tcagtttcta caagagcgga gacccccaat tcggcggggt
  301 cagggtggtg gtcaaccctc gctcctttaa gtcctttgat gctctgctgg ataacttgtc
  361 caggaaggtg cccctccctt ttggagtgag gaacatcagc acccctcggg gcaggcacag
  421 catcacgcgc ctggaggagc tggaggacgg cgagtcctac ctatgttccc acggcaggaa
  481 ggtgcagcct gtagacctgg acaaagcccg tcggcgcccg cggccctggc tcagcagccg
  541 ggccattagc gcgcactcac cgccccaccc cgtagccgtc gctgctcccg gcatgccccg
  601 ccccccacgg agcctagtgg tcttcaggaa tggcgacccg aagacgaggc gtgcggttct
  661 tctgagcagg agggtcaccc agagcttcga ggcatttcta cagcacctga cagaggtcat
  721 gcagcgccct gtggtcaagc tgtacgctac ggacggaagg agggttccca gcctccaggc
  781 agtgatcctg agctctggag ctgtggtggc ggcaggaagg gagccattta aaccaggaaa
  841 ttatgacatc caaaaatact tgcttcctgc tagattacca gggatctctc agcgtgtgta
  901 ccccaaggga aatgcaaagt cagaaagcag aaagataagc acacatatgt cttcaagctc
  961 aaggtcccag atttattctg tttcttctga gaaaacacat aataatgatt gctacttaga
1021 ctattctttt gttcctgaaa agtacttggc cttagaaaag aatgattctc agaatttacc
1081 aatatatcct tctgaagatg atattgagaa atcaattatt tttaatcaag acggcactat
1141 gacagttgag atgaaagttc gattcagaat aaaagaggaa gaaaccataa aatggacaac
1201 tactgtcagt aaaactggtc cttctaataa tgatgaaaag agtgagatga gttttccagg
1261 aagaacagaa agtcgatcat ctggtttaaa gcttgcagca tgttcattct ctgcagatgt
1321 gtcacctatg gagcgaagca gtaatcaaga gggcagtttg gcagaggaga taaacattca
1381 aatgacagat caagtggctg aaacttgcag ttctgctagt tgggagaatg ctactgtgga
1441 cacagatatc atccagggaa ctcaagacca agcaaagcat cgtttttata ggccccctac
1501 acctggacta agaagagtga gacaaaagaa atctgtgatt ggcagtgtga ccttagtatc
1561 tgaaactgag gttcaagaga aaatgattgg acagttttca tatagtgaag aaagggaaag
1621 tggggaaaac aagtctgagt atcacatgtt tacacattct tgcagtaaaa tgtcatcagt
1681 atctaacaaa ccagtacttg ttcagatcaa taacaatgat caaatggagg agtcatcatt
1741 agaaagaaaa aaggaaaaca gtctgcttaa gtcaagtgca ataagtgctg gtgttataga
1801 aattacaagt cagaagatgt tagagatgtc acataataat ggtttgccat caactatatc
1861 aaataactca attgtggagg aagatgtagt tgattgtgtg gtattggaca acaaaactgg
1921 tatcaagaac ttcaaaactt atggtaacac caatgatagg ttcagtccta tttcagcaga
1981 tgcaacccat ttttcaagta ataactctgg aactgacaaa aatatttctg aggctccagc
2041 ttcagaagca tcctctactg tcactgcaag aattgacaga ctaattaatg aatttgctca
2101 gtgtggttta acaaaacttc caaaaaatga aaagaagatt ttgtcatctg ttgccagcaa
2161 aaagaagaaa aaatctcgac agcaagcaat aaattccagg tatcaagatg gacagcttgc
2221 aaccaaagga attcttaata agaatgagag aataaacaca aaaggtagaa ttacaaagga
2281 aatgatagtg caagattcag atagtcccct taaaggaggg atactttgtg aggaagacct
2341 ccagaaaagt gatactgtaa ttgaatcaaa tactttttgt tccaaaagta atctcaattc
2401 cacgatttcc aagaatttcc atagaaataa attaaatact actcaaaatt ccaaggttca
2461 aggactttta accaaaagaa aatctagatc actaaataaa ataagcttag gagcacctaa
2521 aaaaagagaa atcggtcaaa gagataaagt gtttcctcac aatgaatcta aatattgcaa
2581 aagtactttt gaaaacaaaa gtttatttca tgtatttaac atccttgagc aaaaacccaa
2641 agatttttat gcaccgcaat ctcaagcaga agtggcatct gggtatttga gaggaatggc
2701 aaagaagagt ttagtttcaa aagttactga ttcacacata actttaaaaa gccagaaaaa
2761 acgtaaaggg gataaagtga aagcaagtgc tattttaagt aaacaacatg ctacaaccag
2821 ggcaaattct ttagcttctt tgaaaaaacc tgattttcct gaggctattg ctcatcattc
2881 aattcaaaat tatatacaga gttggttgca gaacataaat ccatatccaa ctttaaagcc
2941 tataaaatca gctccagtat gtagaaatga aacgagtgtg gtaaattgta gcaataatag
3001 tttttcaggg aatgatcccc atacaaattc tggaaaaata agtaattttg ttatggaaag
3061 taataagcac ataactaaaa ttgccggttt gacaggagat aatctatgta aagagggaga
3121 taagtctttt attgccaatg acactggtga agaagatctc catgagacac aggttggatc
3181 tctgaatgat gcttatttgg ttcccctgca tgaacactgt actttgtcac agtcagctat
3241 taatgatcat aatactaaaa gtcatatagc tgctgaaaaa tcaggaccag agaaaaaact
3301 tgtttaccag gaaataaacc tagctagaaa aaggcaaagt gtagaggctg ccattcaagt
3361 agatcctata gaagaggaaa ctccaaaaga cctcttacca gtcctgatgc ttcaccaatt
3421 gcaagcttca gttcctggta ttcacaagac tcagaatgga gttgttcaaa tgccaggttc
3481 acttgcaggt gttccctttc attctgcaat atgtaattca tccactaatc tccttctagc
3541 ttggctcttg gtgctaaacc taaagggaag tatgaatagc ttctgtcaag ttgatgctca
3601 caaggctacc aacaaatctt cagaaacact tgcattgttg gagattctaa agcacatagc
3661 tatcacagag gaagctgatg acttgaaagc tgctgttgcc aatttagtgg agtcaactac
3721 aagccacttt ggactcagtg agaaagaaca agacatggtt ccaatagatc tttctgcaaa
3781 ttgttccacg gtcaacattc agagtgttcc taagtgcagt gaaaatgaaa gaacacaagg
3841 aatctcctct ttggatggag gttgctctgc cagtgaggca tgtgcccctg aagtctgtgt
3901 tttggaagtg acttgctctc catgtgagat gtgcactgta aataaggctt attctccaaa
3961 agagacatgt aaccccagtg acactttttt tcctagtgat ggttatggtg tggatcagac
4021 ttctatgaat aaggcttgtt tcctaggaga ggtctgttca cttactgata ctgtgttttc
4081 tgataaggct tgtgctcaaa aggagaacca tacctatgag ggagcttgcc caattgatga
4141 gacctacgtt cctgtcaatg tctgcaatac cattgacttt ttaaactcca aagaaaacac
4201 atatactgat aacttggatt caactgaaga gttagaaaga ggtgatgaca ttcagaaaga
4261 tctaaatatt ttgacagacc ctgaatataa aaatggattt aatacattgg tgtcacatca
4321 aaatgtcagt aatttaagct cctgtggcct ttgcctaagt gaaaaagaag cagaacttga
4381 taagaaacat agttctctag atgattttga aaattgttca ctaaggaagt ttcaggatga
4441 aaatgcatat acttcctttg atatggaaga accacggact tctgaagaac caggctcaat
4501 aaccaacagc atgacatcaa gtgaaagaaa catttcagaa ttggaatctt ttgaagaatt
4561 agaaaaccat gacactgata tctttaatac agtggtaaat ggaggagagc aagccactga
4621 agaattaatc caagaagagg tagaggctag taaaacttta gaattgatag acatctctag
4681 taagaatatt atggaagaaa aaagaatgaa cggtataatt tatgaaataa tcagtaagag
4741 gctggcaaca ccaccatctt tagatttttg ctatgattct aagcaaaata gtgaaaagga
4801 gaccaatgaa ggagaaacta agatggtaaa aatgatggtg aaaactatgg aaactggaag
4861 ttattcagag tcctctcctg atttaaaaaa atgcatcaaa agtccagtga cttctgattg
4921 gtcagactat cggcctgaca gtgacagtga gcagccatat aaaacatcca gtgatgatcc
4981 caatgacagt ggcgaactta cccaagagaa agaatataac ataggatttg ttaaaagggc
5041 aatagaaaaa ctgtacggta aagcagatat tatcaaacca tctttttttc ctgggtctac
5101 ccgcaaatct caggtttgtc cttataattc tgtggaattt cagtgttcca ggaaagcaag
5161 tctttatgat tctgaagggc agtcatttgg ctcttctgaa caggtatcta gtagttcatc
5221 tatgttgcag gaattccagg aggaaagaca agataagtgt gatgttagtg ctgtgaggga
5281 caattattgt aggggtgaca ttgtagaacc tggtacaaaa caaaatgatg atagcagaat
5341 cctcacagac atagaggaag gagtactgat tgacaaaggc aaatggcttc tgaaagaaaa
5401 tcatttgcta aggatgtcat ctgaaaatcc tggcatgtgt ggcaatgcag acaccacatc
5461 agtggacacc ctacttgata ataacagcag tgaggtacca tattcacatt ttggtaattt
5521 ggccccaggc ccaacgatgg atgaactctc ctcttcagaa ctcgaggaac tgactcaacc
5581 ccttgaacta aaatgcaatt actttaacat gcctcatggt agtgactcag aaccttttca
5641 tgaggacttg ctggatgttc gcaatgaaac ctgtgccaag gaaagaatag caaatcatca
5701 tacagaggag aagggtagtc atcagtcaga aagagtatgc acatctgtca ctcattcctt
5761 tatttctgct ggtaacaaag tctaccctgt ctctgatgat gctattaaaa accaaccatt
5821 gcctggcagt aatatgattc atggtacact tcaggaagct gactctttgg ataaactgta
5881 tgctctttgt ggtcaacatt gcccaatact aactgttatt atccaaccca tgaatgagga
5941 agaccgagga tttgcatatc gcaaagaatc tgatattgaa aatttcttgg gtttttattt
6001 atggatgaaa atacacccat atttacttca gacagacaaa aatgtgttca gggaagagaa
6061 caataaagca agtatgagac aaaatcttat tgataatgcc attggtgata tatttgatca
6121 gttttatttc agtaacacat ttgacttgat gggtaaaaga agaaaacaaa aaagaattaa
6181 cttcttgggg ttagaggaag aaggtaattt aaagaaattt caaccagatt tgaaggaaag
6241 gttttgtatg aatttcttgc acacatcatt gttagttgtg ggtaatgtgg attcaaatac
6301 acaagacctc agcggtcaga caaatgaaat ctttaaagca gtcgatgaga ataacaactt
6361 attaaataac agattccagg gctcaagaac aaatctcaac caagtagtaa gagaaaatat
6421 caactgtcat tacttctttg aaatgcttgg tcaagcttgc ctcttagata tttgccaagt
6481 tgagacctcc ttaaatatta gcaacagaaa tattttagaa ctttgtatgt ttgagggtga
6541 aaatcttttc atttgggaag aggaagacat attaaattta actgatcttg aaagcagtag
6601 agaacaagaa gatttataat ttcaatatca gcacactcat tctttgtcaa ttcatttttt
6661 cccatgagat gaagcacatg tgacgaatac ggactagata acctctaaga attttccact
6721 tcttcaaaat gaacttactc tagaaagctt acccttggat aaccagtttg actttcataa
6781 tgtctctgtt ttttgttttt ccaacaatta cagactcagg ttctcttatt ttggaagttt
6841 ctatctggtt ttgttctgaa cttacatttt tttttttttt ggtatctatg attttttttg
6901 ctcagggcat caaaatgtgc taaggacaag aattatatcc tttttaaaaa atgttgttag
6961 cttggtgtaa aatgtatatt gactgtattg gtgaataaat tgaatagaca taacctcaaa
7021 gtacttcact tattcttttt aactactgat ttgataaaaa gtatgattat aagatatcca
7081 cgacaatctc atagtttctt
```

[0414] An exemplary human CD28 amino acid sequence is set forth below (SEQ ID NO: 178; GenBank Accession No: AAI12086.1, Version 1, incorporated herein by reference):

| | |
|---|---|
| 1 | mlrlllalnl fpsiqvtgnk ilvkqspmlv aydnavnlsc |
| | kysynlfsre fraslhkgld |
| 61 | savevcvvyg nysqqlqvys ktgfncdgkl gnesvtfylq |
| | nlyvnqtdiy fckievmypp |
| 121 | pyldneksng tiihvkgkhl cpsplfpgps kpfwvlvvvg |
| | gvlacysllv tvafiifwvr |
| 181 | skrsrllhsd ymnmtprrpg ptrkhyqpya pprdfaayrs |

[0415] An exemplary human CD28 nucleic acid sequence is set forth below (SEQ ID NO: 179; GenBank Accession No: AJ295273.1, Version 1, incorporated herein by reference):

| | |
|---|---|
| 1 | atgctcaggc tgctcttggc tctcaactta ttcccttcaa |
| | ttcaagtaac aggaaacaag |
| 61 | attttggtga agcagtcgcc catgcttgta gcgtacgaca |
| | atgcggtcaa ccttagctac |
| 121 | aatgagaaga gcaatggaac cattatccat gtgaaaggtg |
| | aggagtaaga ggagcaggct |
| 181 | cctgcacagt gactacatga acatgactcc ccgccgcccc |
| | gggcccaccc gcaagcatta |
| 241 | ccagccctat gccccaccac gcgacttcgc agcctatcgc |
| | tcctga |

[0416] An exemplary human ICOS amino acid sequence is set forth below (SEQ ID NO: 180; GenBank Accession No: AAH28006.1, Version 1, incorporated herein by reference):

| | |
|---|---|
| 1 | mksglwyffl fclrikvltg eingsanyem fifhnggvqi |
| | lckypdivqq fkmqllkggq |
| 61 | ilcdltktkg sgntvsiksl kfchsqlsnn sysfflynld |
| | hshanyyfcn lsifdpppfk |
| 121 | vtltggylhi yesqlccqlk fwlpigcaaf vvvcilgcil |
| | icwltkkm |

[0417] An exemplary human ICOS nucleic acid sequence is set forth below (SEQ ID NO: 181; GenBank Accession No: NM_012092.3, Version 3, incorporated herein by reference):

| | |
|---|---|
| 1 | cgagagcctg aattcactgt cagctttgaa cactgaacgc |
| | gaggactgtt aactgtttct |
| 61 | ggcaaacatg aagtcaggcc tctggtattt ctttctcttc |
| | tgcttgcgca ttaaagtttt |
| 121 | aacaggagaa atcaatggtt ctgccaatta tgagatgttt |
| | atatttcaca acggaggtgt |
| 181 | acaaatttta tgcaaatatc ctgacattgt ccagcaattt |
| | aaaatgcagt tgctgaaagg |
| 241 | ggggcaaata ctctgcgatc tcactaagac aaaaggaagt |
| | ggaaacacag tgtccattaa |
| 301 | gagtctgaaa ttctgccatt ctcagttatc caacaacagt |
| | gtctcttttt ttctatacaa |
| 361 | cttggaccat tctcatgcca actattactt ctgcaaccta |
| | tcaatttttg atcctcctcc |
| 421 | ttttaaagta actcttacag gaggatattt gcatatttat |
| | gaatcacaac tttgttgcca |
| 481 | gctgaagttc tggttaccca taggatgtgc agcctttgtt |
| | gtagtctgca ttttgggatg |
| 541 | catacttatt tgttggctta caaaaaagaa gtattcatcc |
| | agtgtgcacg accctaacgg |
| 601 | tgaatacatg ttcatgagag cagtgaacac agccaaaaaa |
| | tctagactca cagatgtgac |
| 661 | cctataatat ggaactctgg cacccaggca tgaagcacgt |
| | tggccagttt tcctcaactt |
| 721 | gaagtgcaag attctcttat ttccgggacc acggagagtc |
| | tgacttaact acatacatct |
| 781 | tctgctggtg ttttgttcaa tctggaagaa tgactgtatc |
| | agtcaatggg gattttaaca |
| 841 | gactgccttg gtactgccga gtcctctcaa aacaaacacc |
| | ctcttgcaac cagctttgga |
| 901 | gaaagcccag ctcctgtgtg ctcactggga gtggaatccc |
| | tgtctccaca tctgctccta |
| 961 | gcagtgcatc agccagtaaa acaaacacat ttacaagaaa |
| | aatgttttaa agatgccagg |
| 1021 | ggtactgaat ctgcaaagca aatgagcagc caaggaccag |
| | catctgtccg catttcacta |
| 1081 | tcatactacc tcttctttct gtagggatga gaattcctct |
| | tttaatcagt caagggagat |
| 1141 | gcttcaaagc tggagctatt ttatttctga gatgttgatg |
| | tgaactgtac attagtacat |
| 1201 | actcagtact ctccttcaat tgctgaaccc cagttgacca |
| | ttttaccaag actttagatg |
| 1261 | ctttcttgtg ccctcaattt tctttttaaa aatacttcta |
| | catgactgct tgacagccca |
| 1321 | acagccactc tcaatagaga gctatgtctt acattctttc |
| | ctctgctgct caatagtttt |
| 1381 | atatatctat gcatacatat atacacacat atgtatataa |
| | aattcataat gaatatattt |
| 1441 | gcctatattc tccctacaag aatatttttg ctccagaaag |
| | acatgttctt ttctcaaatt |
| 1501 | cagttaaaat ggtttacttt gttcaagtta gtggtaggaa |
| | acattgcccg gaattgaaag |
| 1561 | caaatttatt ttattatcct attttctacc attatctatg |
| | ttttcatggt gctattaatt |
| 1621 | acaagtttag ttctttttgt agatcatatt aaaattgcaa |
| | acaaaatcat ctttaatggg |
| 1681 | ccagcattct catggggtag agcagaatat tcatttagcc |
| | tgaaagctgc agttactata |
| 1741 | ggttgctgtc agactatacc catggtgcct ctgggcttga |
| | caggtcaaaa tggtccccat |
| 1801 | cagcctggag cagccctcca gacctgggtg gaattccagg |
| | gttgagagac tcccctgagc |
| 1861 | cagaggccac taggtattct tgctcccaga ggctgaagtc |
| | accctgggaa tcacagtggt |
| 1921 | ctacctgcat tcataattcc aggatctgtg aagagcacat |
| | atgtgtcagg gcacaattcc |
| 1981 | ctctcataaa aaccacacag cctggaaatt ggccctggcc |
| | cttcaagata gccttcttta |
| 2041 | gaatatgatt tggctagaaa gattcttaaa tatgtggaat |
| | atgattattc ttagctggaa |
| 2101 | tattttctct acttcctgtc tgcatgccca aggcttctga |
| | agcagccaat gtcgatgcaa |
| 2161 | caacatttgt aactttaggt aaactgggat tatgttgtag |
| | tttaacattt tgtaactgtg |
| 2221 | tgcttatagt ttacaagtga gacccgatat gtcattatgc |
| | atacttatat tatcttaagc |
| 2281 | atgtgtaatg ctggatgtgt acagtacagt actgaacttg |
| | taatttgaat ctagtatggt |
| 2341 | gttctgtttt cagctgactt ggacaacctg actggctttg |
| | cacaggtgtt ccctgagttg |
| 2401 | tttgcaggtt tctgtgtgtg gggtggggta tggggaggag |
| | aaccttcatg gtggcccacc |
| 2461 | tggcctggtt gtccaagctg tgcctcgaca catcctcatc |
| | cccagcatgg gacacctcaa |
| 2521 | gatgaataat aattcacaaa atttctgtga aatcaaatcc |
| | agttttaaga ggagccactt |
| 2581 | atcaaagaga ttttaacagt agtaagaagg caaagaataa |
| | acatttgata ttcagcaact |
| 2641 | gaaaaaaaaa aa |

[0418] An exemplary human EOMES amino acid sequence is set forth below (SEQ ID NO: 182; GenBank Accession No: NP_001265111.1, Version 1, incorporated herein by reference):

| | |
|---|---|
| 1 | mqlgeqllvs svnlpgahfy plesarggsg gsaghlpsaa |
| | pspqkldldk askkfsgsls |
| 61 | ceavsgepaa asagapaaml sdtdagdafa saaavakpgp |
| | pdgrkgspcg eeelpsaaaa |
| 121 | aaaaaaaaaa tarysmdsls seryylqspg pqgselaapc |
| | slfpyqaaag aphgpvypap |
| 181 | ngarypygsm lppggfpaav cppgraqfgp gagagsgagg |
| | ssgggggpgt yqysqgaply |
| 241 | gpypgaaaag scgglgglgv pgsgfrahvy lcnrplwlkf |
| | hrhqtemiit kqgrrmfpfl |
| 301 | sfninglnpt ahynvfvevv ladpnhwrfq ggkwvtcgka |
| | dnnmqgnkmy vhpespntgs |
| 361 | hwmrqeisfg klkltnnkga nnnntqmivl qslhkyqprl |
| | hivevtedgv edlnepsktq |
| 421 | tftfsetqfi avtayqntdi tqlkidhnpf akgfrdnyds |
| | mytasendrl tpsptdsprs |
| 481 | hqivpggryg vqsffpepfv ntlpqaryyn gertvpqtng |
| | llspqqseev anppqrwlvt |
| 541 | pvqqpgtnkl dissyeseyt sstllpygik slplqtshal |
| | gyypdptfpa magwggrgsy |
| 601 | qrkmaaglpw tsrtsptvfs edqlskekvk eeigsswiet |
| | ppsiksldsn dsgvytsack |
| 661 | rrrlspsnss nenspsikce dinaeeyskd tskgmggyya |
| | fyttp |

[0419] An exemplary human EOMES nucleic acid sequence is set forth below (SEQ ID NO: 183; GenBank Accession No: NM_001278182.1, Version 1, incorporated herein by reference):

| | |
|---|---|
| 1 | aagtttccaa gtggtcaact tgaccgatgc tttggcaatt |
| | gaaaaagggc agaaaggcgc |
| 61 | gggctagtgg gtggatgggg acaaagatct aagtcacctt |
| | cttccagcgt gtgagcctgg |
| 121 | gaggagggtg ggggtcctga ggagcaagag gtacgaggaa |
| | ggaaaaggag agggcttctg |
| 181 | ggttagtttc cacctcctgc tttccaactc acggcgcttt |
| | ccttccggaa aggacgctgg |
| 241 | attcagggcg cgccagtacg cgcagtagcg gcccgcgagt |
| | cggcaggtgg gtagccccgg |
| 301 | cgcgggagga aggggaagtt accttcccct cggaagaggg |
| | cgctggctcc cccatcctgc |
| 361 | ctttataata aggccaccgg aggagaggaa gcagccagct |
| | gccgtctgcg ctttgcaaag |
| 421 | catgcagtta ggggagcagc tcttggtgag ctcagtgaac |
| | ctgcctggcg cgcacttcta |
| 481 | cccgctggag agtgcgcgag gcggcagcgg cgggagcgct |
| | ggccacctcc ccagcgcggc |
| 541 | cccctctcct cagaagttgg acttagacaa agcgtccaag |
| | aagttttccg gcagtctctc |
| 601 | ctgcgaggcg gtgagcgggg agcccgcagc cgccagcgca |
| | ggggcccccg cggccatgct |
| 661 | tagtgacacc gacgccgggg acgcatttgc cagcgctgcg |
| | gcagtggcca agccggggcc |
| 721 | cccggacggc cgcaagggct ccccctgcgg ggaggaggag |
| | ctgccctccg ccgctgcagc |
| 781 | cgccgccgcc gccgccgccg cggctgcggc cactgcgcgc |
| | tactccatgg acagcctgag |
| 841 | ctccgagcgg tactacctcc agtcccccgg tcctcagggg |
| | tcggagctgg ctgcgccctg |
| 901 | ctcactcttc ccgtaccagg cggcggctgg ggcgccccac |
| | ggacctgtgt acccggctcc |
| 961 | taacggggcg cgctacccct acggctccat gctgcccccc |
| | ggcggcttcc ccgcggctgt |
| 1021 | gtgcccaccc gggagggcgc agttcggccc aggagccggt |
| | gcgggcagtg gcgcgggcgg |
| 1081 | tagcagcggc gggggcggcg gcccgggcac ctatcagtac |
| | agccaggggg ctccgctcta |
| 1141 | cgggccgtac cctggagccg cagcggcggg atcttgcgga |
| | ggactggggg gcctgggggt |
| 1201 | tccaggttct ggcttccgtg cccacgtcta cctgtgcaac |
| | cggcctctgt ggctcaaatt |
| 1261 | ccaccgccac caaactgaga tgatcattac gaaacagggc |
| | aggcgcatgt ttcctttctt |
| 1321 | gagcttcaac ataaacggac tcaatcccac tgcccactac |
| | aatgtgttcg tagaggtggt |
| 1381 | gctggcggac cccaaccact ggcgcttcca ggggggcaaa |
| | tgggtgacct gtggcaaagc |
| 1441 | cgacaataac atgcagggca acaaaatgta tgttcaccca |
| | gagtctccta atactggttc |
| 1501 | ccactggatg agacaggaga tttcattcgg gaaattaaaa |
| | ctcaccaata acaaaggcgc |
| 1561 | aaataacaac aacacccaga tgatagtctt acaatcctta |
| | cacaaatacc aaccccgact |
| 1621 | gcatattgtt gaagttacag aggatggcgt ggaggacttg |
| | aatgagccct caaagaccca |
| 1681 | gacttttacc ttctcagaaa cgcaattcat tgcagtgact |
| | gcctaccaaa acaccgatat |
| 1741 | tactcaacta aagattgatc ataacccctt tgcaaaaggc |
| | ttcagagaca actatgattc |
| 1801 | catgtacacc gcttcagaaa atgacaggtt aactccatct |
| | cccacggatt ctcctagatc |
| 1861 | ccatcagatt gtccctggag gtcggtacgg cgttcaatcc |
| | ttcttcccgg agccctttgt |
| 1921 | caacacttta cctcaagccc gctattataa tggcgagaga |
| | accgtgccac agaccaacgg |
| 1981 | cctcctttca ccccaacaga gcgaagaggt ggccaaccct |
| | ccccagcggt ggcttgtcac |
| 2041 | gcctgtccag caacctggga ccaacaaact agacatcagt |
| | tcctatgaat ctgaatatac |
| 2101 | ttctagcaca ttgctcccat atggcattaa atccttgccc |
| | cttcagacat cccatgccct |
| 2161 | ggggtattac ccagacccaa cctttcctgc aatggcaggg |
| | tggggaggtc gaggttctta |
| 2221 | ccagaggaag atggcagctg gactaccatg gacctccaga |
| | acaagcccca ctgtgttctc |
| 2281 | tgaagatcag ctctccaagg agaaagtgaa agaggaaatt |
| | ggctcttctt ggatagagac |
| 2341 | acccccttcc atcaaatctc tagattccaa tgattcagga |
| | gtatacacca gtgcttgtaa |
| 2401 | gcgaaggcgg ctgtctccta gcaactccag taatgaaaat |
| | tcaccctcca taaagtgtga |
| 2461 | ggacattaat gctgaagagt atagtaaaga cacctcaaaa |
| | ggcatgggag ggtattatgc |
| 2521 | tttttacaca actccctaaa gagttatttt aacctcaaaa |
| | attagctaac tttttgcaga |
| 2581 | tggacttggt ggtgtttttt gttgtcttct ttgcctaggt |
| | tgccaaaaag atgtttgcct |
| 2641 | tccaccttga tgcatcctgt tttgtgcaat tctctaaaag |
| | aaggtgccaa agctttttga |
| 2701 | ttgctgcagg taactgaaac aaacctagca tttttaaaaa |
| | ataagattaa tggaagactt |
| 2761 | taaggtattt taaaattcga agggtatcca aggttctgta |
| | tttatttatt ggggagacac |
| 2821 | taacccttca aagaagcagg ctgtgaacat tgggtgccca |
| | gtgctatcag atgagttaaa |
| 2881 | acctttgatt ctcatttcta tttgtaaatt cttaagcaaa |
| | tagaagccga gtgttaaggt |
| 2941 | gttttgcttc tgaaagaggg ctgtgccttc cgtttcagaa |
| | ggagacattt tgctgttaca |
| 3001 | ttctgccagg ggcaaaagat actaggccca ggagtcaaga |
| | aaagcttttg tgaaagtgat |
| 3061 | agtttcacct gactttgatt ccttaacccc cggcttttgg |
| | aacaagccat gtttgcccta |
| 3121 | gtccaggatt gcctcacttg agacttgcta ggcctctgct |
| | gtgtgctggg gtggccagtg |
| 3181 | ggactcagga gagagcaagc taaggagtca ccaaaaaaaa |
| | aaaaaaaaaa aagggagaat |
| 3241 | ttaaaagtgt acagttgtgt gtttagatac actatagaat |
| | aatgtggtat atattgtaca |
| 3301 | aatagtctac ataggtgtct gggataatgt aaaactggtg |
| | ctttggcttt gtaaagaatt |
| 3361 | tgcaaatcac ttaacagctg caggggcaag gggagagttt |
| | catcatcccc atgatatttg |
| 3421 | ggaatattct gtttacttct tagatagtta agaatgtatt |
| | cagctactat gtactaactt |
| 3481 | gaaccgtgtt taaggaaaac tcctatttca tcctcttctt |
| | gcgccatccc ctctccctaa |
| 3541 | cttggtaatg tgaagaaact aaaacctgat accacagctc |
| | ctataggcat tttagagatc |
| 3601 | ttggattttt atgtacagtc ttagtcattt ttaataaatg |
| | tggttcagta agggaacgga |
| 3661 | aaaaaaaaaa aaaa |

[0420] An exemplary human IL2RB amino acid sequence is set forth below (SEQ ID NO: 184; GenBank Accession No: CAG30392.1, Version 1, incorporated herein by reference):

| | |
|---|---|
| 1 | maapalswrl pllilllpla tswasaavng tsqftcfyns |
| | raniscvwsq dgalqdtscq |
| 61 | vhawpdrrrw nqtcellpvs qaswacnlil gapdsqkltt |
| | vdivtlrvlc regvrwrvma |
| 121 | iqdfkpfenl rlmapislqv vhvethrcni sweisqashy |
| | ferhlefear tlspghtwee |
| 181 | aplltlkqkq ewicletltp dtqyefqvrv kplqgefttw |
| | spwsqplafr tkpaalgkdt |
| 241 | ipwlghllvg lsgafgfiil vyllincrnt gpwlkkvlkc |
| | ntpdpskffs qlssehggdv |
| 301 | qkwlsspfps ssfspgglap eisplevler dkvtqlllqq |
| | dkvpepasls snhsltscft |
| 361 | nqgyfffhlp daleieacqv yftydpysee dpdegvagap |
| | tgsspqplqp lsgeddayct |
| 421 | fpsrddlllf spsllggpsp pstapggsga geermppslq |
| | ervprdwdpq plgpptpgvp |
| 481 | dlvdfqpppe lvlreageev pdagpregvs fpwsrppgqg |
| | efralnarlp lntdaylslq |
| 541 | elqgqdpthl v |

[0421] An exemplary human IL2RB nucleic acid sequence is set forth below (SEQ ID NO: 185; GenBank Accession No: NM_000878.3, Version 3, incorporated herein by reference):

| | |
|---|---|
| 1 | gcagccagag ctcagcaggg ccctggagag atggccacgg |
| | tcccagcacc ggggaggact |
| 61 | ggagagcgcg cgctgccacc gccccatgtc tcagccaggg |
| | cttccttcct cggctccacc |
| 121 | ctgtggatgt aatggcggcc cctgctctgt cctggcgtct |
| | gcccctcctc atcctcctcc |
| 181 | tgcccctggc tacctcttgg gcatctgcag cggtgaatgg |
| | cacttcccag ttcacatgct |
| 241 | tctacaactc gagagccaac atctcctgtg tctggagcca |
| | agatggggct ctgcaggaca |
| 301 | cttcctgcca agtccatgcc tggccggaca gacggcggtg |
| | gaaccaaacc tgtgagctgc |
| 361 | tccccgtgag tcaagcatcc tgggcctgca acctgatcct |
| | cggagcccca gattctcaga |
| 421 | aactgaccac agttgacatc gtcaccctga gggtgctgtg |
| | ccgtgagggg gtgcgatgga |
| 481 | gggtgatggc catccaggac ttcaagccct ttgagaacct |
| | tcgcctgatg gcccccatct |
| 541 | ccctccaagt tgtccacgtg gagacccaca gatgcaacat |
| | aagctgggaa atctcccaag |
| 601 | cctcccacta ctttgaaaga cacctggagt tcgaggcccg |
| | gacgctgtcc ccaggccaca |
| 661 | cctgggagga ggcccccctg ctgactctca agcagaagca |
| | ggaatggatc tgcctggaga |
| 721 | cgctcacccc agacacccag tatgagtttc aggtgcgggt |
| | caagcctctg caaggcgagt |
| 781 | tcacgacctg gagcccctgg agccagcccc tggccttcag |
| | gacaaagcct gcagcccttg |
| 841 | ggaaggacac cattccgtgg ctcggccacc tcctcgtggg |
| | cctcagcggg gcttttggct |
| 901 | tcatcatctt agtgtacttg ctgatcaact gcaggaacac |
| | cgggccatgg ctgaagaagg |
| 961 | tcctgaagtg taacacccca gacccctcga agttcttttc |
| | ccagctgagc tcagagcatg |
| 1021 | gaggagacgt ccagaagtgg ctctcttcgc ccttcccctc |
| | atcgtccttc agccctggcg |
| 1081 | gcctggcacc tgagatctcg ccactagaag tgctggagag |
| | ggacaaggtg acgcagctgc |
| 1141 | tcctgcagca ggacaaggtg cctgagcccg catccttaag |
| | cagcaaccac tcgctgacca |
| 1201 | gctgcttcac caaccagggt tacttcttct tccacctccc |
| | ggatgccttg gagatagagg |
| 1261 | cctgccaggt gtactttact tacgacccct actcagagga |
| | agaccctgat gagggtgtgg |
| 1321 | ccggggcacc cacagggtct tccccccaac ccctgcagcc |
| | tctgtcaggg gaggacgacg |
| 1381 | cctactgcac cttcccctcc agggatgacc tgctgctctt |
| | ctcccccagt ctcctcggtg |
| 1441 | gccccagccc cccaagcact gcccctgggg gcagtggggc |
| | cggtgaagag aggatgcccc |
| 1501 | cttctttgca agaaagagtc cccagagact gggaccccca |
| | gcccctgggg cctcccaccc |
| 1561 | caggagtccc agacctggtg gattttcagc caccccctga |
| | gctggtgctg cgagaggctg |
| 1621 | gggaggaggt ccctgacgct ggccccaggg agggagtcag |
| | tttcccctgg tccaggcctc |
| 1681 | ctgggcaggg ggagttcagg gcccttaatg ctcgcctgcc |
| | cctgaacact gatgcctact |
| 1741 | tgtccctcca agaactccag ggtcaggacc caactcactt |
| | ggtgtagaca gatggccagg |
| 1801 | gtgggaggca ggcagctgcc tgctctgcgc cgagcctcag |
| | aaggaccctg ttgagggtcc |
| 1861 | tcagtccact gctgaggaca ctcagtgtcc agttgcagct |
| | ggacttctcc acccggatgg |
| 1921 | cccccaccca gtcctgcaca cttggtccat ccatttccaa |
| | acctccactg ctgctcccgg |
| 1981 | gtcctgctgc ccgagccagg aactgtgtgt gttgcagggg |
| | ggcagtaact ccccaactcc |
| 2041 | ctcgttaatc acaggatccc acgaatttag gctcagaagc |
| | atcgctcctc tccagccctg |
| 2101 | cagctattca ccaatatcag tcctcgcggc tctccagggc |
| | tccctgccct gacctcttcc |
| 2161 | ctgggttttc tgccccagcc tcctccttcc ctcccctccc |
| | cgtccacagg gcagcctgag |
| 2221 | cgtgctttcc aaaacccaaa tatggccacg ctccccctcg |
| | gttcaaaacc ttgcacaggt |
| 2281 | cccactgccc tcagccccac ttctcagcct ggtacttgta |
| | cctccggtgt cgtgtgggga |
| 2341 | catccccttc tgcaatcctc cctaccgtcc tcctgagcca |
| | ctcagagctc cctcacaccc |
| 2401 | cctctgttgc acatgctatt ccctggggct gctgtgcgct |
| | ccccctcatc taggtgacaa |
| 2461 | acttccctga ctcttcaagt gccggttttg cttctcctgg |
| | agggaagcac tgcctccctt |
| 2521 | aatctgccag aaacttctag cgtcagtgct ggagggagaa |
| | gctgtcaggg acccagggcg |
| 2581 | cctggagaaa gaggccctgt tactattcct ttgggatctc |
| | tgaggcctca gagtgcttgg |
| 2641 | ctgctgtatc tttaatgctg gggcccaagt aagggcacag |
| | atccccccac aaagtggatg |
| 2701 | cctgctgcat cttcccacag tggcttcaca gacccacaag |
| | agaagctgat ggggagtaaa |
| 2761 | ccctggagtc cgaggcccag gcagcagccc cgcctagtgg |
| | tgggccctga tgctgccagg |
| 2821 | cctgggacct cccactgccc cctccactgg aggggtctcc |
| | tctgcagctc agggactggc |
| 2881 | acactggcct ccagaagggc agctccacag ggcagggcct |
| | cattattttt cactgcccca |
| 2941 | gacacagtgc ccaacacccc gtcgtatacc ctggatgaac |
| | gaattaatta cctggcacca |
| 3001 | cctcgtctgg gctccctgcg cctgacattc acacagagag |
| | gcagagtccc gtgcccatta |
| 3061 | ggtctggcat gccccctcct gcaaggggct caacccccta |
| | ccccgacccc tccacgtatc |
| 3121 | tttcctaggc agatcacgtt gcaatggctc aaacaacatt |
| | ccaccccagc aggacagtga |
| 3181 | ccccagtccc agctaactct gacctgggag ccctcaggca |
| | cctgcactta caggccttgc |
| 3241 | tcacagctga ttgggcacct gaccacacgc ccccacaggc |
| | tctgaccagc agcctatgag |
| 3301 | ggggtttggc accaagctct gtccaatcag gtaggctggg |
| | cctgaactag ccaatcagat |
| 3361 | caactctgtc ttgggcgttt gaactcaggg agggaggccc |
| | ttgggagcag gtgcttgtgg |
| 3421 | acaaggctcc acaagcgttg agccttggaa aggtagacaa |
| | gcgttgagcc actaagcaga |
| 3481 | ggaccttggg ttcccaatac aaaaatacct actgctgaga |
| | gggctgctga ccatttggtc |
| 3541 | aggattcctg ttgcctttat atccaaaata aactcccctt |
| | tcttgaggtt gtctgagtct |
| 3601 | tgggtctatg ccttgaaaaa agctgaatta ttggacagtc |
| | tcacctcctg ccatagggtc |
| 3661 | ctgaatgttt cagaccacaa ggggctccac acctttgctg |
| | tgtgttctgg ggcaacctac |
| 3721 | taatcctctc tgcaagtcgg tctccttatc cccccaaatg |
| | gaaattgtat ttgccttctc |
| 3781 | cactttggga ggctcccact tcttgggagg gttacatttt |
| | ttaagtctta atcatttgtg |
| 3841 | acatatgtat ctatacatcc gtatctttta atgatccgtg |
| | tgtaccatct ttgtgattat |
| 3901 | ttccttaata ttttttcttt aagtcagttc attttcgttg |
| | aaatacattt atttaaagaa |
| 3961 | aaatctttgt tactctgtaa atgaaaaaac ccattttcgc |
| | tataaataaa aggtaactgt |
| 4021 | acaaaataag tacaatgcaa caaaaaaaaa |

[0422] An exemplary human FASLG amino acid sequence is set forth below (SEQ ID NO: 186; GenBank Accession No: AAH17502.1, Version 1, incorporated herein by reference):

| | |
|---|---|
| 1 | mqqpfnypyp qiywvdssas spwappgtvl pcptsvprrp |
| | gqrrpppppp ppplpppppp |
| 61 | pplpplplpp lkkrgnhstg lcllvmffmv lvalvglglg |
| | mfqlfhlqke laelrestsq |
| 121 | mhtasslekq ighpspppek kelrkvahlt gksnsrsmpl |
| | ewedtygivl lsgvkykkgg |
| 181 | lvinetglyf vyskvyfrgq scnnlplshk vymrnskypq |
| | dlvmmegkmm sycttgqmwa |
| 241 | rssylgavfn ltsadhlyvn vselslvnfe esqtffglyk l |

[0423] An exemplary human FASLG nucleic acid sequence is set forth below (SEQ ID NO: 187; GenBank Accession No: NM_000639.2, Version 2, incorporated herein by reference):

| | |
|---|---|
| 1 | agaatcagag agagagagat agagaaagag aaagacagag |
| | gtgtttccct tagctatgga |
| 61 | aactctataa gagagatcca gcttgcctcc tcttgagcag |
| | tcagcaacag ggtcccgtcc |
| 121 | ttgacacctc agcctctaca ggactgagaa gaagtaaaac |
| | cgtttgctgg ggctggcctg |
| 181 | actcaccagc tgccatgcag cagcccttca attacccata |
| | tccccagatc tactgggtgg |
| 241 | acagcagtgc cagctctccc tgggcccctc caggcacagt |
| | tcttccctgt ccaacctctg |
| 301 | tgcccagaag gcctggtcaa aggaggccac caccaccacc |
| | gccaccgcca ccactaccac |
| 361 | ctccgccgcc gccgccacca ctgcctccac taccgctgcc |
| | acccctgaag aagagaggga |
| 421 | accacagcac aggcctgtgt ctccttgtga tgtttttcat |
| | ggttctggtt gccttggtag |
| 481 | gattgggcct ggggatgttt cagctcttcc acctacagaa |
| | ggagctggca gaactccgag |
| 541 | agtctaccag ccagatgcac acagcatcat ctttggagaa |
| | gcaaataggc caccccagtc |
| 601 | caccccctga aaaaaaggag ctgaggaaag tggcccattt |
| | aacaggcaag tccaactcaa |
| 661 | ggtccatgcc tctggaatgg gaagacacct atggaattgt |
| | cctgctttct ggagtgaagt |
| 721 | ataagaaggg tggccttgtg atcaatgaaa ctgggctgta |
| | ctttgtatat tccaaagtat |
| 781 | acttccgggg tcaatcttgc aacaacctgc ccctgagcca |
| | caaggtctac atgaggaact |
| 841 | ctaagtatcc ccaggatctg gtgatgatgg aggggaagat |
| | gatgagctac tgcactactg |
| 901 | ggcagatgtg ggcccgcagc agctacctgg gggcagtgtt |
| | caatcttacc agtgctgatc |
| 961 | atttatatgt caacgtatct gagctctctc tggtcaattt |
| | tgaggaatct cagacgtttt |
| 1021 | tcggcttata taagctctaa gagaagcact ttgggattct |
| | ttccattatg attctttgtt |
| 1081 | acaggcaccg agaatgttgt attcagtgag ggtcttctta |
| | catgcatttg aggtcaagta |
| 1141 | agaagacatg aaccaagtgg accttgagac cacagggttc |
| | aaaatgtctg tagctcctca |
| 1201 | actcacctaa tgtttatgag ccagacaaat ggaggaatat |
| | gacggaagaa catagaactc |
| 1261 | tgggctgcca tgtgaagagg gagaagcatg aaaaagcagc |
| | taccaggtgt tctacactca |
| 1321 | tcttagtgcc tgagagtatt taggcagatt gaaaaggaca |
| | ccttttaact cacctctcaa |
| 1381 | ggtgggcctt gctacctcaa gggggactgt ctttcagata |
| | catggttgtg acctgaggat |
| 1441 | ttaagggatg gaaaaggaag actagaggct tgcataataa |
| | gctaaagagg ctgaaagagg |
| 1501 | ccaatgcccc actggcagca tcttcacttc taaatgcata |
| | tcctgagcca tcggtgaaac |
| 1561 | taacagataa gcaagagaga tgttttgggg actcatttca |
| | ttcctaacac agcatgtgta |
| 1621 | tttccagtgc aattgtaggg gtgtgtgtgt gtgtgtgtgt |
| | gtgtgtgtgt gtatgactaa |
| 1681 | agagagaatg tagatattgt gaagtacata ttaggaaaat |
| | atgggttgca tttggtcaag |
| 1741 | attttgaatg cttcctgaca atcaactcta atagtgctta |
| | aaaatcattg attgtcagct |
| 1801 | actaatgatg ttttcctata atataataaa tatttatgta |
| | gatgtgcatt tttgtgaaat |
| 1861 | gaaaacatgt aataaaaagt atatgttagg atacaaaaaa |
| | aaaaaaa |

[0424] An exemplary human SLAMF6 amino acid sequence is set forth below (SEQ ID NO: 188; GenBank Accession No: AAI14496.1, Version 1, incorporated herein by reference):

| | |
|---|---|
| 1 | mlwlfqsllf vfcfgpgnvv sqssltplmv ngilgesvtl |
| | plefpagekv nfitwlfnet |
| 61 | slafivphet kspeihvtnp kqgkrinftq syslqlsnlk |
| | medtgsyraq istktsakls |
| 121 | sytlrilrql rniqvtnhsq lfqnmtcelh ltcsvedadd |
| | nvsfrwealg ntlssqpnlt |
| 181 | vswdprisse qdytciaena vsnlsfsysa qklcedvkiq |
| | ytdtkmilfm vsgicivfgf |
| 241 | iillllvlrk rrdslslstq rtqgpaesar nleyvsyspt |
| | nntvyasvth snreteiwtp |
| 301 | rendtitiys tinhskeskp tfsrataldn vv |

[0425] An exemplary human SLAMF6 nucleic acid sequence is set forth below (SEQ ID NO: 189; GenBank Accession No: NM_001184714.1, Version 1, incorporated herein by reference):

| | |
|---|---|
| 1 | agtttatgac agaagggcaa aaacattgac tgcctcaagg |
| | tctcaagcac cagtcttcac |
| 61 | cgcggaaagc atgttgtggc tgttccaatc gctcctgttt |
| | gtcttctgct ttggcccagg |
| 121 | gaatgtagtt tcacaaagca gcttaacccc attgatggtg |
| | aacgggattc tgggggagtc |
| 181 | agtaactctt cccctggagt ttcctgcagg agagaaggtc |
| | aacttcatca cttggctttt |
| 241 | caatgaaaca tctcttgcct tcatagtacc ccatgaaacc |
| | aaaagtccag aaatccacgt |
| 301 | gactaatccg aaacagggaa agcgactgaa cttcacccag |
| | tcctactccc tgcaactcag |
| 361 | caacctgaag atggaagaca caggctctta cagagcccag |
| | atatccacaa agacctctgc |
| 421 | aaagctgtcc agttacactc tgaggatatt aagacaactg |
| | aggaacatac aagttaccaa |
| 481 | tcacagtcag ctatttcaga atatgacctg tgagctccat |
| | ctgacttgct ctgtggagga |
| 541 | tgcagatgac aatgtctcat tcagatggga ggccttggga |
| | aacacacttt caagtcagcc |
| 601 | aaacctcact gtctcctggg accccaggat ttccagtgaa |
| | caggactaca cctgcatagc |
| 661 | agagaatgct gtcagtaatt tatccttctc tgtctctgcc |
| | cagaagcttt gcgaagatgt |
| 721 | taaaattcaa tatacagata ccaaaatgat tctgtttatg |
| | gtttctggga tatgcatagt |
| 781 | cttcggtttc atcatactgc tgttacttgt tttgaggaaa |
| | agaagagatt ccctatcttt |
| 841 | gtctactcag cgaacacagg gccccgcaga gtccgcaagg |
| | aacctagagt atgtttcagt |
| 901 | gtctccaacg aacaacactg tgtatgcttc agtcactcat |
| | tcaaacaggg aaacagaaat |
| 961 | ctggacacct agagaaaatg atactatcac aatttactcc |
| | acaattaatc attccaaaga |
| 1021 | gagtaaaccc actttttcca gggcaactgc ccttgacaat |
| | gtcgtgtaag ttgctgaaag |
| 1081 | gcctcagagg aattcgggaa tgacacgtct tctgatccca |
| | tgagacagaa caaagaacag |
| 1141 | gaagcttggt tcctgttgtt cctggcaaca gaatttgaat |
| | atctaggata ggatgatcac |
| 1201 | ctccagtcct tcggacttaa acctgcctac ctgagtcaaa |
| | cacctaagga taacatcatt |
| 1261 | tccagcatgt ggttcaaata atattttcca atccacttca |
| | ggccaaaaca tgctaaagat |
| 1321 | aacacaccag cacattgact ctctctttga taactaagca |
| | aatggaatta tggttgacag |
| 1381 | agagtttatg atccagaaga caaccacttc tctcctttta |
| | gaaagcagca ggattgactt |
| 1441 | attgagaaat aatgcagtgt gttggttaca tgtgtagtct |
| | ctggagttgg atgggcccat |
| 1501 | cctgatacaa gttgagcatc ccttgtctga aatgcttggg |
| | attagaaatg tttcagattt |
| 1561 | caattttttt tcagattttg gaatatttgc attatattta |
| | gcggttgagt atccaaatcc |
| 1621 | aaaaatccaa aattcaaaat gctccaataa gcatttccct |
| | tgagtttcat tgatgtcgat |
| 1681 | gcagtgctca aaatctcaga ttttggagca ttttggatat |
| | tggatttttg gatttgggat |
| 1741 | gctcaacttg tacaatgttt attagacaca tctcctggga |
| | catactgcct aaccttttgg |
| 1801 | agccttagtc tcccagactg aaaaaggaag aggatggtat |
| | tacatcagct ccattgtttg |
| 1861 | agccaagaat ctaagtcatc cctgactcca gtgtctttgt |
| | caccaggccc tttggactct |
| 1921 | acctcagaaa tatttcttgg accttccact tctcctccaa |
| | ctccttgacc accatcctgt |
| 1981 | atccaaccat caccacctct aacctgaatc ctaccttaag |
| | atcagaacag ttgtcctcac |
| 2041 | ttttgttctt gtccctctcc aacccactct ccacaagatg |
| | gccagagtaa tgtttttaat |
| 2101 | ataaattgga tccttcagtt tcctgcttaa aaccctgcag |
| | gtttcccaat gcactcagaa |
| 2161 | agaaatccag tttccatggc cctggatggt ctggcccacc |
| | tccagcctca gctagcatta |
| 2221 | cccttctgac actctctatg tagcctccct gatcttcttt |
| | cagctcctct attaaaggaa |
| 2281 | aagttcttta tgttaattat ttacatcttc ctgcaggccc |
| | ttcctctgcc tgctggggtc |
| 2341 | ctcctattct ttaggtttaa ttttaaatat gtcacctcct |
| | aagagaaacc ttcccagacc |
| 2401 | actctttcta aaatgaatct tctaggctgg gcatggtggc |
| | tcacacctgt aatccctgta |
| 2461 | ctttgggagg ccaagggggg agatcacttg aggtcaggag |
| | ttcaagacca gcctggccaa |
| 2521 | cttggtgaaa ccccgtcttt actaaaaata caaaaaaatt |
| | agccaggcgt ggtggtgcac |
| 2581 | ccctaaaatc ccagctactt gagagactga ggcaggagaa |
| | tcgcttgaac ccaggaggtg |
| 2641 | gaggttccag tgagccaaaa tcatgccaat gtattccagt |
| | ctgggtgaca gagtgagact |
| 2701 | ctgtctcaaa aaataaataa ataaaataaa atgaaataga |
| | tcttataaaa aaaa |

[0426] An exemplary human GAPDH amino acid sequence is set forth below (SEQ ID NO: 190; GenBank Accession No: NP_001276675.1, Version 1, incorporated herein by reference):

| | |
|---|---|
| 1 | mgkvkvgvng fgrigrlvtr aafnsgkvdi vaindpfidl |
| | nymvymfqyd sthgkfhgtv |
| 61 | kaengklvin gnpitifqer dpskikwgda gaeyvvestg |
| | vfttmekaga hlqggakrvi |
| 121 | isapsadapm fvmgvnheky dnslkiisna scttnclapl |
| | akvihdnfgi veglmttvha |
| 181 | itatqktvdg psgklwrdgr galqniipas tgaakavgkv |
| | ipelngkltg mafrvptanv |
| 241 | svvdltcrle kpakyddikk vvkqasegpl kgilgytehq |
| | vvssdfnsdt hsstfdagag |
| 301 | ialndhfvkl iswydnefgy snrvvdlmah maske |

[0427] An exemplary human GAPDH nucleic acid sequence is set forth below (SEQ ID NO: 191; GenBank Accession No: NM_002046.5, Version 5, incorporated herein by reference):

| | |
|---|---|
| 1 | gcctcaagac cttgggctgg gactggctga gcctggcggg |
| | aggcggggtc cgagtcaccg |
| 61 | cctgccgccg cgcccccggt ttctataaat tgagcccgca |
| | gcctcccgct tcgctctctg |
| 121 | ctcctcctgt tcgacagtca gccgcatctt cttttgcgtc |
| | gccagccgag ccacatcgct |
| 181 | cagacaccat ggggaaggtg aaggtcggag tcaacggatt |
| | tggtcgtatt gggcgcctgg |
| 241 | tcaccagggc tgcttttaac tctggtaaag tggatattgt |
| | tgccatcaat gaccccttca |
| 301 | ttgacctcaa ctacatggtt tacatgttcc aatatgattc |
| | cacccatggc aaattccatg |
| 361 | gcaccgtcaa ggctgagaac gggaagcttg tcatcaatgg |
| | aaatcccatc accatcttcc |
| 421 | aggagcgaga tccctccaaa atcaagtggg gcgatgctgg |
| | cgctgagtac gtcgtggagt |
| 481 | ccactggcgt cttcaccacc atggagaagg ctggggctca |
| | tttgcagggg ggagccaaaa |
| 541 | gggtcatcat ctctgccccc tctgctgatg cccccatgtt |
| | cgtcatgggt gtgaaccatg |
| 601 | agaagtatga caacagcctc aagatcatca gcaatgcctc |
| | ctgcaccacc aactgcttag |
| 661 | cacccctggc caaggtcatc catgacaact ttggtatcgt |
| | ggaaggactc atgaccacag |
| 721 | tccatgccat cactgccacc cagaagactg tggatggccc |
| | ctccgggaaa ctgtggcgtg |
| 781 | atggccgcgg ggctctccag aacatcatcc ctgcctctac |
| | tggcgctgcc aaggctgtgg |
| 841 | gcaaggtcat ccctgagctg aacgggaagc tcactggcat |
| | ggccttccgt gtccccactg |
| 901 | ccaacgtgtc agtggtggac ctgacctgcc gtctagaaaa |
| | acctgccaaa tatgatgaca |
| 961 | tcaagaaggt ggtgaagcag gcgtcggagg gccccctcaa |
| | gggcatcctg ggctacactg |
| 1021 | agcaccaggt ggtctcctct gacttcaaca gcgacaccca |
| | ctcctccacc tttgacgctg |
| 1081 | gggctggcat tgccctcaac gaccactttg tcaagctcat |
| | ttcctggtat gacaacgaat |
| 1141 | ttggctacag caacagggtg gtggacctca tggcccacat |
| | ggcctccaag gagtaagacc |
| 1201 | cctggaccac cagccccagc aagagcacaa gaggaagaga |
| | gagaccctca ctgctgggga |
| 1261 | gtccctgcca cactcagtcc cccaccacac tgaatctccc |
| | ctcctcacag ttgccatgta |
| 1321 | gaccccttga agaggggagg ggcctaggga gccgcacctt |
| | gtcatgtacc atcaataaag |
| 1381 | taccctgtgc tcaaccagtt aaaaaaaaaa aaaaaaaaaa |
| | a |

[0428] An exemplary human HPRT1 amino acid sequence is set forth below (SEQ ID NO: 192; GenBank Accession No: AAH00578.1, Version 1, incorporated herein by reference):

| | |
|---|---|
| 1 | matrspgvvi sddepgydld lfcipnhyae dlervfiphg |
| | limdrterla rdvmkemggh |
| 61 | hivalcvlkg gykffadlld yikalnrnsd rsipmtvdfi |
| | rlksycndqs tgdikviggd |
| 121 | dlstltgknv livediidtg ktmqtllslv rqynpkmvkv |
| | asllvkrtpr svgykpdfvg |
| 181 | feipdkfvvg yaldyneyfr dlnhvcvise tgkakyka |

[0429] An exemplary human HPRT1 nucleic acid sequence is set forth below (SEQ ID NO: 193; GenBank Accession No: NM_000194.2, Version 2, incorporated herein by reference):

| | |
|---|---|
| 1 | ggcggggcct gcttctcctc agcttcaggc ggctgcgacg |
| | agccctcagg cgaacctctc |
| 61 | ggctttcccg cgcggcgccg cctcttgctg cgcctccgcc |
| | tcctcctctg ctccgccacc |
| 121 | ggcttcctcc tcctgagcag tcagcccgcg cgccggccgg |
| | ctccgttatg gcgacccgca |
| 181 | gccctggcgt cgtgattagt gatgatgaac caggttatga |
| | ccttgattta ttttgcatac |
| 241 | ctaatcatta tgctgaggat ttggaaaggg tgtttattcc |
| | tcatggacta attatggaca |
| 301 | ggactgaacg tcttgctcga gatgtgatga aggagatggg |
| | aggccatcac attgtagccc |
| 361 | tctgtgtgct caaggggggc tataaattct ttgctgacct |
| | gctggattac atcaaagcac |
| 421 | tgaatagaaa tagtgataga tccattccta tgactgtaga |
| | ttttatcaga ctgaagagct |
| 481 | attgtaatga ccagtcaaca ggggacataa aagtaattgg |
| | tggagatgat ctctcaactt |
| 541 | taactggaaa gaatgtcttg attgtggaag atataattga |
| | cactggcaaa acaatgcaga |
| 601 | ctttgctttc cttggtcagg cagtataatc caaagatggt |
| | caaggtcgca agcttgctgg |
| 661 | tgaaaaggac cccacgaagt gttggatata agccagactt |
| | tgttggattt gaaattccag |
| 721 | acaagtttgt tgtaggatat gcccttgact ataatgaata |
| | cttcagggat ttgaatcatg |
| 781 | tttgtgtcat tagtgaaact ggaaaagcaa aatacaaagc |
| | ctaagatgag agttcaagtt |
| 841 | gagtttggaa acatctggag tcctattgac atcgccagta |
| | aaattatcaa tgttctagtt |
| 901 | ctgtggccat ctgcttagta gagctttttg catgtatctt |
| | ctaagaattt tatctgtttt |
| 961 | gtactttaga aatgtcagtt gctgcattcc taaactgttt |
| | atttgcacta tgagcctata |
| 1021 | gactatcagt tccctttggg cggattgttg tttaacttgt |
| | aaatgaaaaa attctcttaa |
| 1081 | accacagcac tattgagtga aacattgaac tcatatctgt |
| | aagaaataaa gagaagatat |
| 1141 | attagttttt taattggtat tttaattttt atatatgcag |
| | gaaagaatag aagtgattga |
| 1201 | atattgttaa ttataccacc gtgtgttaga aaagtaagaa |
| | gcagtcaatt ttcacatcaa |
| 1261 | agacagcatc taagaagttt tgttctgtcc tggaattatt |
| | ttagtagtgt ttcagtaatg |
| 1321 | ttgactgtat tttccaactt gttcaaatta ttaccagtga |
| | atctttgtca gcagttccct |
| 1381 | tttaaatgca aatcaataaa ttcccaaaaa tttaaaaaaa |
| | aaaaaaaaaa aaaaa |

[0430] An exemplary human PSK1 amino acid sequence is set forth below (SEQ ID NO: 194; GenBank Accession No: NP_079418.1, Version 1, incorporated herein by reference):

| | |
|---|---|
| 1 | mpstnragsl kdpeiaelff kedpeklftd lreighgsfg |
| | avyfardvrt nevvaikkms |
| 61 | ysgkqstekw qdiikevkfl qrikhpnsie ykgcylreht |
| | awlvmeyclg sasdllevhk |
| 121 | kplqeveiaa ithgalqgla ylhshtmihr dikagnillt |
| | epgqvkladf gsasmaspan |
| 181 | sfvgtpywma pevilamdeg qydgkvdvws lgitcielae |
| | rkpplfnmna msalyhiaqn |
| 241 | esptlqsnew sdyfrnfvds clqkipqdrp tseellkhif |
| | vlrerpetvl idliqrtkda |
| 301 | vreldnlqyr kmkkllfqea hngpaveaqe eeeeqdhgvg |
| | rtgtvnsvgs nqsipsmsis |
| 361 | assqsssvns lpdvsddkse ldmmegdhtv msnssvihlk |
| | peeenyreeg dprtrasdpq |
| 421 | sppqvsrhks hyrnrehfat irtaslvtrq mqeheqdsel |
| | reqmsgykrm rrqhqkqlmt |
| 481 | lenklkaemd ehrlrldkdl etqrnnfaae meklikkhqa |
| | amekeakvms neekkfqqhi |
| 541 | qaqqkkelns flesqkreyk lrkeqlkesk elqikkqfqd |
| | tckiqtrqyk alrnhllett |
| 601 | pksehkavlk rlkeeqtrkl ailaeqydhs inemlstqal |
| | rldeaqeaec qvlkmqlqqe |
| 661 | lellnayqsk ikmqaeaqhd relreleqrv slrralleqk |
| | ieeemlalqn erterirsll |
| 721 | erqareieaf dsesmrlgfs nmvlsnlspe afshsypgas |
| | gwshnptggp gphwghpmgg |
| 781 | ppqawghpmq ggpqpwghps gpmqgvprgs smgvrnspqa |
| | lrrtasggrt eqgmsrstsv |
| 841 | tsqisngshm syt |

[0431] An exemplary human PSK1 nucleic acid sequence is set forth below (SEQ ID NO: 195; GenBank Accession No: NM_025142.1, Version 1, incorporated herein by reference):

| | |
|---|---|
| 1 | cccctcctcc tcctcactcc tcaccctcca gggtagcggc |
| | taccggagcg ctgcaggggg |
| 61 | ctgcgcctgc ctgctccgcc ccagacctgt cggcgaaagg |
| | tagtttatgc caacgtgact |
| 121 | tcattcatac agatgaacca aggatcggga tagcagtata |
| | aaattagaat caagacagct |
| 181 | gactgctcag caggatgcca tcaactaaca gagcaggcag |
| | cctgaaggac cctgaaattg |
| 241 | cagagctctt cttcaaagaa gatccagaga agctcttcac |
| | agatctcaga gaaattggcc |
| 301 | atggaagctt tggagcagtg tattttgcac gagatgtgcg |
| | taccaatgaa gtggtggcca |
| 361 | tcaagaaaat gtcttatagt ggaaagcagt ctactgagaa |
| | atggcaggat attattaagg |
| 421 | aagtcaagtt tctacaaaga ataaaacatc ccaacagtat |
| | agaatacaaa ggctgttatt |
| 481 | tacgtgaaca cacagcatgg cttgtaatgg aatattgttt |
| | aggatctgct tcggatttac |
| 541 | tagaagttca caaaaagcca ttacaagaag tggaaatagc |
| | agcaattaca catggtgctc |
| 601 | ttcagggatt agcctactta cattctcata ctatgattca |
| | tagagatatc aaagcaggaa |
| 661 | atatccttct gacagaacca ggccaggtga aacttgctga |
| | ctttggctct gcttccatgg |
| 721 | catcacctgc caattccttt gtgggaacgc cgtattggat |
| | ggccccagaa gtaattttag |
| 781 | ccatggatga aggacaatat gatggcaaag tagatgtgtg |
| | gtctcttgga ataacatgta |
| 841 | ttgaactagc ggaaaggaag cctcctttat ttaatatgaa |
| | tgcaatgagt gccttatatc |
| 901 | acatagccca aaatgaatcc cctacactac agtctaatga |
| | atggtctgat tattttcgca |
| 961 | actttgtaga ttcttgcctc cagaaaatcc ctcaagatcg |
| | acctacatca gaggaacttt |
| 1021 | taaagcacat atttgttctt cgggagcgcc ctgaaaccgt |
| | gttaatagat ctcattcaga |
| 1081 | ggacaaagga tgcagtaaga gagctggaca atctgcagta |
| | tcgaaagatg aagaaactcc |
| 1141 | ttttccagga ggcacataat ggaccagcag tagaagcaca |
| | ggaagaagaa gaggaacaag |
| 1201 | atcatggtgt tggccggaca ggaacagtta atagtgttgg |
| | aagtaatcaa tccattccca |
| 1261 | gcatgtccat cagtgccagc agccaaagca gtagtgttaa |
| | cagtcttcca gatgtctcag |
| 1321 | atgacaagag tgagctagac atgatggagg gagaccacac |
| | agtgatgtct aacagttctg |
| 1381 | ttatccattt aaaaccagag gaagaaaatt acagagaaga |
| | gggagatcct agaacaagag |
| 1441 | catcagatcc acaatctcca ccccaagtat ctcgtcacaa |
| | atcacactat cgtaatcgag |
| 1501 | aacactttgc tactatacgg acagcatcac tggttacgag |
| | gcaaatgcaa gaacatgagc |
| 1561 | aggactctga gcttagagaa caaatgtctg gctataagcg |
| | aatgaggcga caacatcaaa |
| 1621 | agcaactgat gactctggaa aacaagctaa aggctgagat |
| | ggatgaacat cgcctcagat |
| 1681 | tagacaaaga tcttgaaact cagcgtaaca attttgctgc |
| | agaaatggag aaacttatca |
| 1741 | agaaacacca ggctgccatg gagaaagagg ctaaagtgat |
| | gtccaatgaa gagaaaaaat |
| 1801 | ttcagcaaca tattcaggcc caacagaaga aagaactgaa |
| | tagttttctc gagtcccaga |
| 1861 | aaagagagta taaacttcga aaagagcagc ttaaagagtc |
| | taaagaactc caaataaaaa |
| 1921 | agcagtttca ggatacctgc aaaatccaaa ccagacagta |
| | caaagcatta agaaatcacc |
| 1981 | tgctggagac tacaccaaag agtgagcaca aagctgttct |
| | gaaacggctc aaggaggaac |
| 2041 | agacccggaa attagctatc ttggctgagc agtatgatca |
| | cagcattaat gaaatgctct |
| 2101 | ccacacaagc cctgcgtttg gatgaagcac aggaagcaga |
| | gtgccaggtt ttgaagatgc |
| 2161 | agctgcagca ggaactggag ctgttgaatg cgtatcagag |
| | caaaatcaag atgcaagctg |
| 2221 | aggcacaaca tgatcgagag cttcgcgagc ttgaacagag |
| | ggtctccctc cggagggcac |
| 2281 | tcttagaaca aaagattgaa gaagagatgt tggctttgca |
| | gaatgagcgc acagaacgaa |
| 2341 | tacgaagcct gttggaacgt caagccagag agattgaagc |
| | ttttgactct gaaagcatga |
| 2401 | gactaggttt tagtaatatg gtcctttcta atctctcccc |
| | tgaggcattc agccacagct |
| 2461 | acccgggagc ttctggttgg tcacacaacc ctactggggg |
| | tccaggacct cactggggtc |
| 2521 | atcccatggg tggcccacca caagcttggg gccatccaat |
| | gcaaggtgga ccccagccat |
| 2581 | ggggtcaccc ttcagggcca atgcaagggg tacctcgagg |
| | tagcagtatg ggagtccgca |
| 2641 | atagccccca ggctctgagg cggacagctt ctgggggacg |
| | gacggagcag ggcatgagca |
| 2701 | gaagcacgag tgtcacttca caaatatcca atgggtcaca |
| | catgtcttat acataactta |
| 2761 | ataattgaga gtggcaattc cgctggagct gtctgccaaa |
| | agaaactgcc tacagacatc |
| 2821 | atcacagcag cctcctcact tgggtactac agtgtggaag |
| | ctgagtgcat atggtatatt |
| 2881 | ttattcattt ttgtaaagcg ttctgttttg tgtttactaa |
| | ttgggatgtc atagtacttg |
| 2941 | gctgccgggt ttgtttgttt ttggggaaat tttgaaaagt |
| | ggagttgata ttaaaaataa |
| 3001 | atgtgtatgt gtgtacatat atatacacac acatacacat |
| | atattatgca tgtggtgaaa |
| 3061 | agaattggct agatagggga tttttctgaa cactgcaaaa |
| | atagaacgta gcaaaatggc |
| 3121 | ttcagttatc acttttgggt gtctgtatcc taagaagttt |
| | ctgaaaagat ctaaagcctt |
| 3181 | tttatcccat atcccaaatt cttatgagcc actcacagca |
| | ggcagcatat gttgaaataa |
| 3241 | gttattactg gtacacacct gcattgcctc accagtgtat |
| | ttatttgtta ttaaattgat |
| 3301 | ctgacttctc agcctcattt ggactaaaaa aagaaagcag |
| | aaatccatga acacattgct |
| 3361 | tctcggcctt ttggctaaga tcaagtgtag aaatccatga |
| | acactaaagg acttcattga |
| 3421 | ttttttcaga gagtagaaaa caacttagtt tttctttttt |
| | cctgaatgcg tcataggctt |
| 3481 | gtgagtgatt tttgtccatt caattgtgcc ttctttgtat |
| | tatgataaga tgggggtact |
| 3541 | taaggagatc acaagttgtg tgaggattgc attaacaaac |
| | ctatgagcct tcaatgggga |
| 3601 | agaccagaag ggtgagaggg gccctgaaag ttcatatggt |
| | gggtatgtcc cgcagcagag |
| 3661 | tgaggagatg aagcttacgt gtcctgacgt tttgttgctt |
| | atactgtgat atctcatcct |
| 3721 | agctaagctc tataatgccc aagaccccaa acagtacttt |
| | tactttgttt gtacaaaaac |
| 3781 | aaagacatat agccaataca aatcaaatgc cggaggtgtt |
| | tgatgccata tttgcaaatt |
| 3841 | gccatctatt gaaattctcg tcacactaca tagacataat |
| | tgttatctcc ttttggctta |
| 3901 | tgtgattttc tgtttacaag tagaatagcc aattatttaa |
| | atgtttagtt gccacagtga |
| 3961 | accaggagtc actgagccaa tgactttacc agctgctgac |
| | taatcttcat caccactgta |
| 4021 | gattttgctg catgtgcagg tcctctattt ttaattgctg |
| | ttttcgttgc tgcagtactt |
| 4081 | tacaaacttc tagttcgttg agacttagtg accatttggc |
| | atcaagttaa catcacacaa |
| 4141 | taggaaacac cacttccaca agtctcaagc ctcagtgcta |
| | aagtactact gaaaaggaac |
| 4201 | taggaagttt ggccaattaa aaaaaaaaag taaaataagt |
| | tatagtggtc agggaatctc |
| 4261 | ttgacgaaag ctaactctta tttttcaggg ggcacatgtt |
| | ttgttttgtt atgttttgtt |
| 4321 | gtacaatgaa ggatgaaccc aatgctaaaa agtcagttat |
| | tttcttggtt ttccatttct |
| 4381 | tgtatataaa ttgtgttgga ggtgggtagg aagctgtgag |
| | tatgacttga agaaaaatat |
| 4441 | ccttttcagt gacaaatcag agtttcttac aagttattgt |
| | cctgctccct tccaagttgt |
| 4501 | cttgaagaat ccttgctgct aactctggat cctgcttttc |
| | ctatagtcag agggctccaa |
| 4561 | ggtagaactc tctaagtccc tctcaatggc actctttgcc |
| | tagaccaaac taatgaccaa |
| 4621 | acagtaatca atctatcact gttgaagtcc tggttttctc |
| | aaccaaattt taagtctttc |
| 4681 | ccaggtatgt cagtcgagtt gccatgaatc ctcacctgta |
| | ggagtttctg ggattcattt |
| 4741 | taaggaaact ggaagaaaat taatgtttta atgtaaatgt |
| | ttttaaaacc aagatcacca |
| 4801 | tagagttcac acaaaatttt aggcagtgtt tcaagaagca |
| | ctcttatgtg ttgttctttc |
| 4861 | agcccatgct ccaggtcacc ggtttttagg taaacatgac |
| | atgacatgta cttgtaatat |
| 4921 | cagtgaaagg ggcttttagt cgtctcagta tcttttttgc |
| | attcaggtat tatagcgttt |
| 4981 | ccaacaaatt gagaaattac ttatttggtg taaaatgacg |
| | agagagcttt agaatttaat |
| 5041 | aaaatgtcaa aaatacaatt tgataccctt aaaaattatt |
| | catagatctg gctgctctgt |
| 5101 | actactggat gggtggaata gggaagcaga tcacttttgc |
| | atacaaaaac tctttcaaac |
| 5161 | ccaaaatatt attggtggta cattttaaag tccaattgtg |
| | gacttaaatt agtcaaattg |
| 5221 | agagttactg agtccattca gatctccagt agggttttgt |
| | atctaatgta tttggccacc |
| 5281 | agttttacat gtaggtcatg actatacctg gattttatca |
| | ttaagttaac tttaaagtat |
| 5341 | atacagtttg caaaaaatga ttcaaattaa ttggtttgta |
| | tatgtttgtg agatctagct |
| 5401 | tctgaggaat ctcatacata gtaggaacca tcatagagta |
| | aagcttgtag cagaaaaatt |
| 5461 | ggaagggttt tgagatatcc tagagaaaga gcaagcactt |
| | tctgaatcag tggggaaata |
| 5521 | tcaatatttg atcaaattaa cactacctcc ttcccagtgt |
| | tggtgttcac tcactatatg |
| 5581 | tctttaagaa aattaaaact atggaaaatt tgtctagcat |
| | atcagaagtt gtaaatgcta |
| 5641 | tatctggtat ccagaggctg gctgtaaaaa gttccttggg |
| | gtcactctat ctcacatttt |
| 5701 | ttttggttag cattttaaaa atgcaaagcc acatactttg |
| | aaatatatta ttccaaattg |
| 5761 | agctcccttc cctttgcaca tattttttcc tccccttatt |
| | gaagtcagct ctaaccccaa |
| 5821 | attctagtat ccaaaagtat ttttatttgt ataatgctat |
| | ctgaaaaatg tgtttatatt |
| 5881 | atattttcag agctgcaatt cttattcgcc atttcaatac |
| | ctagagatag agagtcttgt |
| 5941 | atttgaagcc acacacactg gtgtaatatg cttagtactc |
| | taggtcaagg atttgttggt |
| 6001 | aaatggaaca ttttagcata gtcatgattt ttggttgcct |
| | agacatcagg taaacattca |
| 6061 | gtacactaaa gaaactatcc tggacactcc ctcctgcttc |
| | caccaatttt tttctcaccc |
| 6121 | ccttttcaaa aattgaaaac tctatgagtg tctttttgag |
| | accataaagc agactttagt |
| 6181 | aactttctat ttctgtaagt actaaatgtc tggcatttta |
| | aacttttgta gaatacatta |
| 6241 | tgttggacac tggaataata ctatttattt tcacctgtga |
| | aaaatgactt cattgtactt |
| 6301 | gaaacacctc ctttgcattt ctccatttgt gccattcact |
| | agtggaaata aattgtatta |
| 6361 | taccatgatc tactggcttt ttaaaactgt attaaatatg |
| | cacatttttg gtatagctat |
| 6421 | tatcatttgt atgtatatat tgtatataca tatgagtgtc |
| | tgtatgtgtg tatagatgga |
| 6481 | tggatgtaac tcatactgta catttccatc agggcactta |
| | aaagttctgt tatttttgtt |
| 6541 | tggttttgtt atttcagtcc tcagttaagg caagaatgca |
| | tgtgtttctt aagaatgagt |
| 6601 | actctgcgtt gatgtttatg agaaggtggt cattagatgc |
| | agtcttttcc tttttaatcc |
| 6661 | cctcttagca cttctgtgag tggagaggac attaagtaaa |
| | atttggaatc ataagttgca |
| 6721 | atgcagtaaa atggtgctgg ggaaggagcc agttagtgtt |
| | tctgtgagtt tgtgttgtga |
| 6781 | tgcaataaga gataagtaat gcagagagaa atgaaccatg |
| | gaaagtaaga acactgatgg |
| 6841 | tgattcctct gcaaagatga taagaaaaag aaccaataaa |
| | tcacacaatc tttatgtgct |
| 6901 | ttctatatgt atttcttagt agtgatacca ttgatcctct |
| | tacttttttt actccattaa |
| 6961 | tactaataat tatatacttt gctgaggatc aaaacagcca |
| | agaaaggaat tactgctaaa |
| 7021 | gcatctaaga ttctcctgaa ctgtaaaatc aacaggaaat |
| | ggccactggg agagaaggat |
| 7081 | ttggtattgg gtgaggggct ttctcccttt acctgcctct |
| | tcttgcttgc taatagtaag |
| 7141 | ttctttgtgc accttccacc acttctgagc cactactatt |
| | caagtagaga tttgccccaa |
| 7201 | cacattaact ttttccttgg agatttatat ggtcctgcat |
| | tttgtcctgt gctcacaatg |
| 7261 | tgaagtgtct tctgtattca aatcaaaaaa taatatattt |
| | aaggtatata agtgtgaatc |
| 7321 | tcctataatg atggaagaag aggttctctt gtcttagata |
| | gaaaagagcc ttctccaaga |
| 7381 | gcaatgtcaa aacttgggct gtcatctttg agctgtttac |
| | caaaatacag accattattg |
| 7441 | aagaaaaaca aattatctat tttgttttcc cccatctaac |
| | atgatagtgc ccccaaccag |
| 7501 | gttgtagcat tgccttttaa aagagactca ctcactctta |
| | gtttttaaga actggaaatt |
| 7561 | tcccatcctc agatccctta aaggatgaag agttggctgt |
| | acacttagcg gacttgcctc |
| 7621 | ttgtatgcaa ggactactga ttgaagtctg ttttgctgtg |
| | tctggttatg ttgtctgcac |
| 7681 | ttttatgaaa tcactacaat aggtctgcat tggaaatgac |
| | tattaatttg taaagaagta |
| 7741 | agttttatta aacactgtct agaaaaagaa agtgaagctg |
| | agaactcttc ctttattgtg |
| 7801 | catttatatt ttctgctgaa ttccggtagt tccctttaaa |
| | gtcatgttga ctaatgtttt |
| 7861 | cctccttgtt tgtattcaga tttccaaaat ttcactcata |
| | caagggaaga gactccattt |
| 7921 | agcttaacgg tagtctttag atcataagaa atatataaat |
| | tagtatgcac cttatctgcc |
| 7981 | tgttgtgggt ttcttaaact tgcacttcct acccacccaa |
| | agatagatat cctttaaaga |
| 8041 | aaataaaggc agagaattaa aactggggag ccatttacta |
| | tgtcaccatc actgttaact |
| 8101 | gtttcccagc aatctaaact ttttgaagtt tcagaggtgt |
| | attttttttt tgtatatatg |
| 8161 | tctgtgtgat tgtattgttt tgtttctaaa tatacaagga |
| | attctttaaa tagagaaaaa |
| 8221 | ggttaatcct cactgaaaca ccaggatgcc cactggatat |
| | actaatctga acatctgtag |
| 8281 | gtagtttgtc atgaaaaagt ggagagaaga tgagactttt |
| | gaatgaatga aaaagggtat |
| 8341 | cttgataccc agaattcccc ccaaagtacg ggtaattcaa |
| | cctgcacagt tttctttcac |
| 8401 | tcaaagtgtt cagcacttgt gagtgaaaaa tcatgtaatt |
| | atctgtaaat atgtagctaa |
| 8461 | caaattgacc tagtttctgt atttttttgt ttttgtacta |
| | aagtttatag gtctgtgcca |
| 8521 | gctagagaga agttgctgtc attaccagtt gtggtcctag |
| | catctaaccc tgaaaccatc |
| 8581 | ctaggtgaca tttttagaat taatacttaa atgttaaaca |
| | gggggaaatg aagcttaatc |
| 8641 | atggtcaggt ttgagatctt ttgcagtgaa ataattttat |
| | ttaatataaa tgatcacatg |
| 8701 | tcctcaatca tgaatgaggt agggagcctc tctcccccag |
| | tggccatgtt tacaaaagtg |
| 8761 | tgttttgtct ataaagtgca agtgttttaa tgtttatgta |
| | aattatgcag gtgataacat |
| 8821 | ggtttggaac tgtttattgg gctctttaac tgaattttca |
| | aatgaaatga actatgctta |
| 8881 | ttgctggcac attgatccca tttctggaac atttttccta |
| | tttccagagt tacatatgtt |
| 8941 | cttttgtcat tacccaattt aacctccctt tctctgatat |
| | gccttgtagc caaagtatta |
| 9001 | aaggctgatg aacatagaca agggaaatgc atttcttaga |
| | aatccgtgaa ccctcagttg |
| 9061 | tatgctttca gtactcgtgt taatatgttt ctatggcaac |
| | tctgaggtca gtggtttaga |
| 9121 | aatgagatac cagtgttaat gaaaagtgtg tgctctttgc |
| | ttttgcatgg cttggcttag |
| 9181 | tatccaaggt atattagggc cacttgaaag catgaagacc |
| | agttatatag ggaacaggtt |
| 9241 | tctctcagtg gcacattttg ctttttctga gccccaaata |
| | cattgcctgg gcatgaacat |
| 9301 | tgttaccgta aattgcacat ggtcatggac tgaattatgt |
| | gactttaaag gatgtaactg |
| 9361 | cccaacattt gcagattctg ggtggtctat gtgaccattt |
| | gtctcgtatc caaaaacccc |
| 9421 | ggggctattg gaacccttcc aacacttttt cctttgtcat |
| | agacaagttt atatataact |
| 9481 | taccaagatg ttggctgtcc tggtgtattg ccagacagct |
| | ctcttttggt tcccattcca |
| 9541 | aatgtgctgc tgtccttctt tgcatttcac aatatcaaag |
| | aaaccaccac ccttcttcct |
| 9601 | aacagcattt tatgcctttt attccacatt aaatgggaat |
| | tgtgcctact taggagtgcc |
| 9661 | cctccaatta attacatgtg tccaagaata atccaagcta |
| | gagacacaag gtgggaaaac |
| 9721 | atttcaaaaa aaaaaagtcc tcttaaggcc agtaatttat |
| | ctgaaaaggt attttatcac |
| 9781 | accttgacac cttatatatg agcctattag gagctgcagg |
| | tggtttcata gggtaaaatc |
| 9841 | caagaaaaga gaaggatgtg tggggtttct attagaagat |
| | aattttgttc tcattttacc |
| 9901 | ttttctttta tgatccttct ctgctagaac aggttaattc |
| | tccaaatttg ttttgttttg |
| 9961 | ttttgttatt ttttagggaa ctcttttgca aaagcaatgg |
| | tcggatgtaa ataacattta |
| 10021 | aagtatagtg cacataactt ccccggactg ttccaatctg |
| | ataatttgta aatgctttag |
| 10081 | agttttttta attaacactt gtgttgctaa attctattta |
| | tgtaagtctg ctaaagtttt |
| 10141 | ttagcccact taaaacttaa gacaaccatt taaaataatg |
| | gatgggttac tatgagcaat |
| 10201 | ttcgctttca gaaccccctt gttttagtat atgaaaaagc |
| | ctaatgcgca ttaatgaggt |
| 10261 | tgaagagact atgagaaata tgtatagtgt atattttaaa |
| | acagctttgc ttgtattgtg |
| 10321 | aagatttaaa aacaaacttg agatttttaa cgtaactatt |
| | aacacagttt taacataagt |
| 10381 | tatcccactg ggtttaagag catcttgaat gtataatcct |
| | ttttgtaacc caggttggtt |
| 10441 | tctactttta ccagtcaccc aaacatattt atgtttttag |
| | ttttatgtac tcatttccct |
| 10501 | ttgttttcct caaacagcat gatttttttg cacatgtaga |
| | aattttttaa aagaaagaaa |
| 10561 | ttagtacatc attttctctg gattttcttc acttccctct |
| | tcctttctac taactccttc |
| 10621 | cttaaaggcc atatcactcc atttgcatta tttgtgcaaa |
| | tgccagggtt ggtttttatt |
| 10681 | tttatttttg ctatttacct aaaaaaagaa aatgcttcag |
| | tcaattgctt ttttatttaa |
| 10741 | aaaaaaaaag aaaaaaagct gtaaccttat catttctgag |
| | tagaccattg agcgatgaat |
| 10801 | gcacacctgt agtagcccag gaccagctgt ggtggctaaa |
| | gggaatatgt taattaagca |
| 10861 | agaggttctt ttctaaaagt ggtatctgtt atccacaatg |
| | tattttagtt attcccacaa |
| 10921 | gtcaggggtc cagataaaat gagggttatc agctaactga |
| | tatgctatca ttgaggttca |
| 10981 | tcaatgaatt tgtacatttc tagttccctt tggtgaaggg |
| | aaaaatgatg attttgcaag |
| 11041 | acctagattt tggcttggtt tcttgcctcc ttttttggca |
| | gccttcatct tctcatctcc |
| 11101 | caaaccccct gagcccgtag ggttttcata gtggacaaag |
| | aacttgtggt cttttaaaac |
| 11161 | tgggactgat acttttttga gagagtatcg tgtcgaaagt |
| | gtgatgttct accactttac |
| 11221 | caataactaa ttttaaatac acattgtcct ctcgattttt |
| | ggaccaaaca gacgctcaca |
| 11281 | gtggaggctt atcaagggtt gcattgggga agaagcctct |
| | ccctctctgt cagcaccagc |
| 11341 | tggtaaaggt gactgtacag atgtgcattt tccttttggt |
| | ataaatggtc cacagcacta |
| 11401 | actggtaagg cttattgtac agtatattgt cagtattctt |
| | ctggttcagc ataccttata |
| 11461 | gttcatatat aacctgtatt aattgtatag attgtgcatt |
| | aaaagctgtt accaagttgt |
| 11521 | cagaacataa gagcgaaaac aaggtcatat gtaatatttt |
| | gtttgtaagt atcctttgta |
| 11581 | tcatagcaaa ggaaatgttt aaaaaaatca actgtaataa |
| | agtaatttta gtacacaaaa |
| 11641 | aaaaaaaaaa aa |

[0432] An exemplary human PSG7 amino acid sequence is set forth below (SEQ ID NO: 196; GenBank Accession No: NP_002774.2, Version 2, incorporated herein by reference):

| | |
|---|---|
| 1 | mgplsappct ghitwkglll tasllnfwnp pttaqvtiea |
| | qppkvsegkd vlllvhnlpq |
| 61 | nltgyiwykg qirdlyhyvt syivdgqiik ygpaysgret |
| | vysnaslliq nvtqedtgsy |
| 121 | tlhiikrgdg tggvtgrftf tlyletpkps isssnfnpre |
| | ateaviltcd petpdasylw |
| 181 | wmngqslpmt hslqlsetnr tlylfgvtny tagpyeceir |
| | npvsasrsdp vtlnllpklp |
| 241 | kpyitinnln prenkdvstf tcepksenyt yiwwlngqsl |
| | pvsprvkrri enrililpsv |
| 301 | trnetgpyqc eirdryggir sdpvtlnvly gpdlpriyps |
| | ftyyhsgqnl ylscfadsnp |
| 361 | paqyswting kfqlsgqkls ipqittkhsg lyacsvrnsa |
| | tgkessksvt vrvsdwtlp |

[0433] An exemplary human PSG7 nucleic acid sequence is set forth below (SEQ ID NO: 197; GenBank Accession No: U18467.1, Version 1, incorporated herein by reference):

| | |
|---|---|
| 1 | attcgggcct aggctcatct ccacagagga gaacacgcag |
| | ggagcagaga ccatggggcc |
| 61 | cctctcagcc cctccctgca cacagcatat aacctggaaa |
| | gggctcctgc tcacagcatc |
| 121 | acttttaaac ttctggaacc cgcccaccac agcccaagtc |
| | acgattgaag cccagccacc |
| 181 | aaaagtttct gaggggaagg atgttcttct acttgtccac |
| | aatttgcccc agaatcttac |
| 241 | tggctacatc tggtacaaag gacaaatcag ggacctctac |
| | cattatgtta catcatatgt |
| 301 | agtagacggt caaataatta aatatgggcc tgcatacagt |
| | ggacgagaaa cagtatattc |
| 361 | caatgcatcc ctgctgatcc agaatgtcac ccaggaagac |
| | acaggatcct acactttaca |
| 421 | catcataaag cgaggtgatg ggactggagg agtaactgga |
| | cgtttcacct tcaccttata |
| 481 | cctggagact cccaaaccct ccatctccag cagcaatttc |
| | aaccccaggg aggccacgga |
| 541 | ggctgtgatc ttaacctgtg atcctgagac tccagatgca |
| | agctacctgt ggtggatgaa |
| 601 | tggtcagagc ctccctatga ctcacagctt gcagctgtct |
| | gaaaccaaca ggaccctcta |
| 661 | cctatttggt gtcacaaact atactgcagg accctatgaa |
| | tgtgaaatac ggaacccagt |
| 721 | gagtgccagc cgcagtgacc cagtcaccct gaatctcctc |
| | ccgaagctgc ccaagcccta |
| 781 | catcaccatc aataacttaa accccaggga gaataaggat |
| | gtctcaacct tcacctgtga |
| 841 | acctaagagt gagaactaca cctacatttg gtggctaaat |
| | ggtcagagcc tcccggtcag |
| 901 | tcccagggta aagcgacgca ttgaaaacag gatcctcatt |
| | ctacccagtg tcacgagaaa |
| 961 | tgaaacagga ccctatcaat gtgaaatacg ggaccgatat |
| | ggtggcatcc gcagtgaccc |
| 1021 | agtcaccctg aatgtcctct atggtccaga cctccccaga |
| | atttaccctt cgttcaccta |
| 1081 | ttaccattca ggacaaaacc tctacttgtc ctgctttgcg |
| | gactctaacc caccggcaca |
| 1141 | gtattcttgg acaattaatg ggaagtttca gctatcagga |
| | caaaagcttt ctatccccca |
| 1201 | gattactaca aagcatagcg ggctctatgc ttgctctgtt |
| | cgtaactcag ccactggcaa |
| 1261 | ggaaagctcc aaatccgtga cagtcagagt ctctgactgg |
| | acattaccct gaattctact |
| 1321 | agttcctcca attccatctt ctcccatgga acctcaaaga |
| | gcaagaccca ctctgttcca |
| 1381 | gaagccctat aagtcagagt tggacaactc aatgtaaatt |
| | tcatgggaaa atccttgtac |
| 1441 | ctgatgtctg agccactcag aactcaccaa aatgttcaac |
| | accataacaa cagctgctca |
| 1501 | aactgtaaac aaggaaaaca agttgatgac ttcacactgt |
| | ggacagtttt tcccaagatg |
| 1561 | tcagaataag actccccatc atgatgaggc tctcacccct |
| | cttagctgtc cttgcttgtg |
| 1621 | cctgcctctt tcacttggca ggataatgca gtcattagaa |
| | tttcacatgt agtataggag |
| 1681 | cttctgaggg taacaacaga gtgtcagata tgtcatctca |
| | acctcaaact tttacataac |
| 1741 | atctcaggag gaaatgtggc tctctccatc ttgcatacag |
| | ggctcccaat agaaatgaac |
| 1801 | acagagatat tgcctgtgtg tttgcagaga agatggtttc |
| | tataaagagt aggaaagctg |
| 1861 | aaattatagt agagtcccct ttaaatgcac attgtgtgga |
| | tggctctcac catttcctaa |
| 1921 | gagatacatt gtaaaacgtg acagtaagac tgattctagc |
| | agaataaaac atgtactaca |
| 1981 | tttgctaaa |

[0434] An exemplary human PSG8 amino acid sequence is set forth below (SEQ ID NO: 198; GenBank Accession No: AAI37501.1, Version 1, incorporated herein by reference):

| | |
|---|---|
| 1 | mgllsappct qritwkglll tasllnfwnp pttaqvtiea |
| | qptkvsegkd vlllvhnlpq |
| 61 | nltgyiwykg qirdlyhyit syvvdgqiii ygpaysgret |
| | iysnaslliq nvtqedagsy |
| 121 | tlhiimggde nrgvtghftf tlyletpkps isssklnpre |
| | ameavsltcd petpdasylw |
| 181 | wmngqslpms hrlqlsetnr tlfllgvtky tagpyeceir |
| | npvsasrsdp ftlnllpklp |
| 241 | kpyitinnlk prenkdvlnf tcepksenyt yiwwlngqsl |
| | pvsprvkrpi enrililpsv |
| 301 | trnetgpyqc eirdqyggir sypvtlnvly gpdlpriyps |
| | ftyyrsgevl ylscsadsnp |
| 361 | paqyswting kfqlsgqklf ipqittkhsg lyacsvrnsa |
| | tgkessksmt vkvsgkripv |
| 421 | slaigi |

[0435] An exemplary human PSG8 nucleic acid sequence is set forth below (SEQ ID NO: 199; GenBank Accession No: BC142628.1, Version 1, incorporated herein by reference):

| | |
|---|---|
| 1 | ggacagcact gctgagagct gtgctcagga agcttctgga |
| | tcctaggctc atctccacag |
| 61 | aggagaacac acagacagca gagaccatgg ggctcctctc |
| | agcccctccc tgcacacagc |
| 121 | gcatcacctg gaaggggctc ctgctcacag catcactttt |
| | aaacttctgg aacccaccca |
| 181 | cgactgccca agtcacgatt gaagcccagc caaccaaagt |
| | ttctgagggg aaggatgttc |
| 241 | ttctacttgt ccacaatttg ccccagaatc ttactggcta |
| | catctggtac aaagggcaaa |
| 301 | tcagggacct ctaccattac attacatcat atgtagtaga |
| | cggtcaaata attatatatg |
| 361 | ggcctgcata cagtggacga gaaacaatat attccaatgc |
| | atccctgctg atccagaatg |
| 421 | tcacccagga agacgcagga tcctacacct tacacatcat |
| | aatgggaggt gatgagaata |
| 481 | gaggagtaac tggacatttc accttcacct tatatctgga |
| | gactcccaag ccctccatct |
| 541 | ccagcagcaa attaaacccc agggaggcca tggaggctgt |
| | gagcttaacc tgtgatcctg |
| 601 | agactccgga cgcaagctac ctgtggtgga tgaatggtca |
| | gagcctccct atgtctcaca |
| 661 | ggttgcagtt gtctgaaacc aacaggaccc tctttctatt |
| | gggtgtcaca aagtacactg |
| 721 | caggacccta tgaatgtgaa atacggaacc cagtgagtgc |
| | cagccgcagt gacccattca |
| 781 | ccctgaatct cctcccgaag ctgcccaagc cctacatcac |
| | catcaacaac ttaaaaccca |
| 841 | gggagaataa ggatgtctta aacttcacct gtgaacctaa |
| | gagtgagaac tacacctaca |
| 901 | tttggtggct aaatggtcag agcctcccgg tcagtcccag |
| | ggtaaagcga cccattgaaa |
| 961 | acaggatcct cattctaccc agtgtcacga gaaatgaaac |
| | aggaccctat caatgtgaaa |
| 1021 | taagggacca atatggtggc atccgcagtt acccagtcac |
| | cctgaatgtc ctctatggtc |
| 1081 | cagacctccc cagaatttac ccttcattca cctattaccg |
| | ttcaggagaa gtcctctact |
| 1141 | tgtcctgttc tgcggactct aacccaccgg cacagtattc |
| | ttggacaatt aatgggaagt |
| 1201 | ttcagctatc aggacaaaag ctctttatcc cccaaattac |
| | tacaaagcat agcgggctct |
| 1261 | atgcttgctc tgttcgtaac tcagccactg gcaaggaaag |
| | ctccaaatcc atgacagtaa |
| 1321 | aagtctctga ctggacatta ccctgaattc tactagttcc |
| | tccaattcca ttttcttcca |
| 1381 | tggaatcgct aagaaaaaga cccactctgt tccagaagcc |
| | ctataagctg gaggtggaca |
| 1441 | actcaatgta aatttcatgg gaaaaccctt gtacctgaag |
| | cgtgagccac tcagaactca |
| 1501 | ctaaaatgtt cgacaccata acaacagatg ctcaaactgt |
| | aaaccaggac aacaagtgga |
| 1561 | tgacttcaca ctgtggacag tttttcccaa gatgtcagaa |
| | caagactccc catcatgatg |
| 1621 | aggctctcac ccctcttaac tgtccttgct catgcctgcc |
| | tctttcactt ggcaggataa |
| 1681 | tgcagtcatt agaatttcac atgtagtagc ttctgagggt |
| | aacaatagag tgtcagatat |
| 1741 | gtcatctcaa cccaaacttt tacataacat ctcaggggga |
| | aatgtggctc tctccacctt |
| 1801 | gcatacagga ctcccaatag aaatgaacac agagatattg |
| | cccgtgtgtt tgcagataag |
| 1861 | atggtttcta tgaagaggta ggaaagctga aattataata |
| | gagtcccctt taaatgcaca |
| 1921 | ttctgtggat ggctctcgcc atttcctaag agatacattg |
| | taaaatgtga cagtaatact |
| 1981 | gattctagca gaataaaaca tgtaccacat ttgctaatac |
| | aaaaaaaaaa aaaaaaaaaa |
| 2041 | aaaaaaaaaa aaaaaaaaaa aaaaaaaaaa aaaaaaaaaa |
| | aaaaaaaaaa aaaaaaaaaa |
| 2101 | aaaaaaaaaa aaaaaaaaaa aaaaaaaaaa aaaaaaaaaa |
| | aaaa |

[0436] An exemplary human PSG9 amino acid sequence is set forth below (SEQ ID NO: 200; GenBank Accession No: AAH20759.1, Version 1, incorporated herein by reference):

| | |
|---|---|
| 1 | mgplpapsct qritwkglll tasllnfwnp pttaevtiea |
| | qppkvsegkd vlllvhnlpq |
| 61 | nlpgyfwykg emtdlyhyii syivdgkiii ygpaysgret |
| | vysnaslliq nvtrkdagty |
| 121 | tlhiikrgde treeirhftf tlyletpkpy isssnlnpre |
| | ameavrlicd petldasylw |
| 181 | wmngqslpvt hrlqlsktnr tlylfgvtky iagpyeceir |
| | npvsasrsdp vtlnllpklp |
| 241 | ipyitinnln prenkdvlaf tcepksenyt yiwwlngqsl |
| | pvspgvkrpi enrililpsv |
| 301 | trnetgpyqc eiqdrygglr snpvilnvly gpdlpriyps |
| | ftyyrsgenl dlscftesnp |
| 361 | paeyfwting kfqqsgqklf ipqitrnhsg lyacsvhnsa |
| | tgkeisksmt vkvsgpchgd |
| 421 | ltesqs |

[0437] An exemplary human PSG9 nucleic acid sequence is set forth below (SEQ ID NO: 201; GenBank Accession No: BC020759.1, Version 1, incorporated herein by reference):

| | |
|---|---|
| 1 | agaaggagga aggacagcac agctgacagc cgtgctcaga |
| | cagcttctgg atcccaggct |
| 61 | catctccaca gaggagaaca cacaggcagc agagaccatg |
| | gggcccctcc cagccccttc |
| 121 | ctgcacacag cgcatcacct ggaaggggct cctgctcaca |
| | gcatcacttt taaacttctg |
| 181 | gaacccgccc accactgccg aagtcacgat tgaagcccag |
| | ccacccaaag tttctgaggg |
| 241 | gaaggatgtt cttctacttg tccacaattt gccccagaat |
| | cttcctggct acttctggta |
| 301 | caaaggggaa atgacggacc tctaccatta cattatatcg |
| | tatatagttg atggtaaaat |
| 361 | aattatatat gggcctgcat acagtggaag agaaacagta |
| | tattccaacg catccctgct |
| 421 | gatccagaat gtcacccgga aggatgcagg aacctacacc |
| | ttacacatca taaagcgagg |
| 481 | tgatgagact agagaagaaa ttcgacattt caccttcacc |
| | ttatacttgg agactcccaa |
| 541 | gccctacatc tccagcagca acttaaaccc cagggaggcc |
| | atggaggctg tgcgcttaat |
| 601 | ctgtgatcct gagactctgg acgcaagcta cctatggtgg |
| | atgaatggtc agagcctccc |
| 661 | tgtgactcac aggttgcagc tgtccaaaac caacaggacc |
| | ctctatctat ttggtgtcac |
| 721 | aaagtatatt gcaggaccct atgaatgtga aatacggaac |
| | ccagtgagtg ccagtcgcag |
| 781 | tgacccagtc accctgaatc tcctcccgaa gctgcccatc |
| | ccctacatca ccatcaacaa |
| 841 | cttaaacccc agggagaata aggatgtctt agccttcacc |
| | tgtgaaccta agagtgagaa |
| 901 | ctacacctac atttggtggc taaacggtca gagcctcccc |
| | gtcagtcccg gggtaaagcg |
| 961 | acccattgaa aacaggatac tcattctacc cagtgtcacg |
| | agaaatgaaa caggacccta |
| 1021 | tcaatgtgaa atacaggacc gatatggtgg cctccgcagt |
| | aacccagtca tcctaaatgt |
| 1081 | cctctatggt ccagacctcc ccagaattta cccttcattc |
| | acctattacc gttcaggaga |
| 1141 | aaacctcgac ttgtcctgct tcacggaatc taacccaccg |
| | gcagagtatt tttggacaat |
| 1201 | taatgggaag tttcagcaat caggacaaaa gctctttatc |
| | ccccaaatta ctagaaatca |
| 1261 | tagcgggctc tatgcttgct ctgttcataa ctcagccact |
| | ggcaaggaaa tctccaaatc |
| 1321 | catgacagtc aaagtctctg gtccctgcca tggagacctg |
| | acagagtctc agtcatgact |
| 1381 | gcaacaactg agacactgag aaaaagaaca ggctgatacc |
| | ttcatgaaat tcaagacaaa |
| 1441 | gaagaaaaaa actcaatgtt attggactaa ataatcaaaa |
| | ggataatgtt ttcataattt |
| 1501 | tttattggaa aatgtgctga ttctttgaat gttttattct |
| | ccagatttat gaactttttt |
| 1561 | tcttcagcaa ttggtaaagt atacttttat aaacaaaaat |
| | tgaaatattt gcttttgctg |
| 1621 | tctatctgaa tgccccagaa ttgtgaaact attcatgagt |
| | attcataggt ttatggtaat |
| 1681 | aaagttattt gcacatgttc caaaaaaaaa aaaaaaaaaa |
| | aaaaaaaaaa a |

[0438] An exemplary human PSG11 amino acid sequence is set forth below (SEQ ID NO: 202 GenBank Accession No: AAA60203.1, Version 1, incorporated herein by reference):

| | |
|---|---|
| 1 | mgpfpapsct qritwkglll tasllnfwnp pttaevtiea |
| | qppkvsegkd vlllvhnlpq |
| 61 | nlpgyfwykg emtdlyhyii syivdgkiii ygpaysgret |
| | vysnaslliq nvtrkdagty |
| 121 | tlhiikrgde treeirhftf tlyletpkpy isssnlnpre |
| | ameavrlicd petldasylw |
| 181 | wmngqslpvt hrlqlsktnr tlylfgvtky iagpyeceir |
| | npvsairsdp vtlnllpklp |
| 241 | ipyitinnln prenkdvlaf tcepksenyt yiwwlngqsl |
| | pvspgvkrpi enrililpsv |
| 301 | trnetgpyqc eirdrygglr snpvilnvly gpdlpriyps |
| | ftyyrsgenl dlscftesnp |
| 361 | paeyfwting kfqqsgqklf ipqitrnhsg lyacsvhnsa |
| | tgkeisksmt vkvsgpchgd |
| 421 | ltesqs |

[0439] An exemplary human PSG11 nucleic acid sequence is set forth below (SEQ ID NO: 203; GenBank Accession No: M58591.1, Version 1, incorporated herein by reference):

| | |
|---|---|
| 1 | cagccgtgct cagacagctt ctggatccta ggctcatctc |
| | cacagaggag aacacgcagg |
| 61 | cagcagagac catggggccc ttcccagccc cttcctgcac |
| | acagcgcatc acctggaagg |
| 121 | ggctcctgct cacagcatca cttttaaact tctggaaccc |
| | gcccaccact gccgaagtca |
| 181 | cgattgaagc ccagccaccc aaagtttctg aggggaagga |
| | tgttcttcta cttgtccaca |
| 241 | atttgcccca gaatcttcct ggctacttct ggtacaaagg |
| | ggaaatgacg gacctctacc |
| 301 | attacattat atcgtatata gttgatggta aaataattat |
| | atatgggcct gcatacagtg |
| 361 | gaagagaaac agtatattcc aacgcatccc tgctgatcca |
| | gaatgtcacc cggaaggatg |
| 421 | caggaaccta caccttacac atcataaagc gaggtgatga |
| | gactagagaa gaaattcgac |
| 481 | atttcacctt caccttatac ttggagactc ccaagcccta |
| | catctccagc agcaacttaa |
| 541 | accccaggga ggccatggag gctgtgcgct taatctgtga |
| | tcctgagact ctggacgcaa |
| 601 | gctacctatg gtggatgaat ggtcagagcc tccctgtgac |
| | tcacaggttg cagctgtcca |
| 661 | aaaccaacag gaccctctat ctatttggtg tcacaaagta |
| | tattgcagga ccctatgaat |
| 721 | gtgaaatacg gaacccagtg agtgccattc gcagtgaccc |
| | agtcaccctg aatctcctcc |
| 781 | cgaagctgcc catcccctac atcaccatca acaacttaaa |
| | ccccagggag aataaggatg |
| 841 | tcttagcctt cacctgtgaa cctaagagtg agaactacac |
| | ctacatttgg tggctaaacg |
| 901 | gtcagagcct ccccgtcagt cccggggtaa agcgacccat |
| | tgaaaacagg atactcattc |
| 961 | tacccagtgt cacgagaaat gaaacaggac cctatcaatg |
| | tgaaatacgg gaccgatatg |
| 1021 | gtggcctccg cagtaaccca gtcatcctaa atgtcctcta |
| | tggtccagac ctccccagaa |
| 1081 | tttacccttc attcacctat taccgttcag gagaaaacct |
| | cgacttgtcc tgcttcacgg |
| 1141 | aatctaaccc accggcagag tatttttgga caattaatgg |
| | gaagtttcag caatcaggac |
| 1201 | aaaagctctt tatcccccaa attactagaa atcatagcgg |
| | gctctatgct tgctctgttc |
| 1261 | ataactcagc cactggcaag gaaatctcca aatccatgac |
| | agtcaaagtc tctggtccct |
| 1321 | gccatggaga cctgacagag tctcagtcat gactgcaaca |
| | actgagacac tgagaaaaag |
| 1381 | aacaggctga taccttcatg aaattcaaga caaagaagaa |
| | aaaaactcaa tgttattgga |
| 1441 | ctaaataatc aaaaggataa tgttttcata attttttatt |
| | ggaaaatgtg ctgattcttt |
| 1501 | gaatgtttta ttctccagat ttatgaactt tttttcttca |
| | gcaattggta aagtatactt |
| 1561 | ttgtaaacaa aaattgaaat atttgctttt gctgtctatc |
| | tgaatgcccc agaattgtga |
| 1621 | aactattcat gagtattcat aggtttatgg taataaagtt |
| | atttgcacat gttccgta |

[0440] An exemplary human miR-185 nucleic acid sequence is set forth below (SEQ ID NO: 204; GenBank Accession No: NR_029706.1, Version 1, incorporated herein by reference):

| | |
|---|---|
| 1 | agggggcgag ggattggaga gaaaggcagt tcctgatggt |
| | cccctcccca ggggctggct |
| 61 | ttcctctggt ccttccctcc ca |

[0441] An exemplary human miR-513a2 nucleic acid sequence is set forth below (SEQ ID NO: 205; GenBank Accession No: LM609506.1, Version 1, incorporated herein by reference):

| | |
|---|---|
| 1 | ggatgccaca ttcagccatt cagtgtgcag tgcctttcac |
| | agggaggtgt catttatgtg |
| 61 | aactaaaata taaatttcac ctttctgaga agggtaatgt |
| | acagcatgca ctgcatatgt |
| 121 | ggtgtcc |

[0442] An exemplary human HMGB1 amino acid sequence is set forth below (SEQ ID NO: 210 GenBank Accession No: CAG33144.1, Version 1, incorporated herein by reference):

| | |
|---|---|
| 1 | mgkgdpkkpr gkmssyaffv qtcreehkkk hpdasvnfse |
| | fskkcserwk tmsakekgkf |
| 61 | edmakadkar yeremktyip pkgetkkkfk dpnapkrpps |
| | afflfcseyr pkikgehpgl |
| 121 | sigdvakklg emwnntaadd kqpyekkaak lkekyekdia |
| | ayrakgkpda akkgvvkaek |
| 181 | skkkkeeeed eedeedeeee edeededeee ddddd |

[0443] An exemplary human HMGB1 nucleic acid sequence is set forth below (SEQ ID NO: 211; GenBank Accession No: NM_001313893.1, Version 1, incorporated herein by reference):

| | |
|---|---|
| 1 | tttctgcgga gggattacgc tgacgaaaga gacctgcttg |
| | cgcgtcgctg ttccgtggtc |
| 61 | cgcgcgagcg tggtcgggag ccgctggttc ctggggtgac |
| | ccgcggaggt gggagaggga |
| 121 | agggcttccg aagccggcgg gggtgccatg gaccctctcc |
| | gccggcgcgg ccttcacagc |
| 181 | tgggccgcgc cgggcatccg tagtccgctc tcccaaagcc |
| | tcggtggagc tgaagctgcc |
| 241 | acagagtgca tgttcacaaa gggtcatcac acacggagct |
| | gcccctccct gtctccctag |
| 301 | agcccatctt cgaggccagg ggcttttcta ccaggattct |
| | ggggtgtttc tcctcctttc |
| 361 | ctccctccca gatcttctca cggtaagggg agcagcgaaa |
| | gcgcagggac tttgcattcc |
| 421 | acgacccgtt ctgactagtc aacagccgat ctgtccctgc |
| | tgctctaatt ccagctgccc |
| 481 | tgccttgttt taacttcaga gaaaggggga gttctcattt |
| | gataagttta agcctttgct |
| 541 | ttcgtaggaa ggtcatgtgg cttaagggac atcgtgaccg |
| | cgtatgctat ttctgcctgt |
| 601 | gcattctaaa tcttgggggc agcatattcc agaagtcctt |
| | ttggtcgatt ggttctgtgt |
| 661 | cctaggataa caatttgtag tttctgacca tttctttaca |
| | gaaaaaccac aattggtatt |
| 721 | ttggactgcg gggtttttta gtggtctcaa actaaatgat |
| | tatattctgg aataatgctg |
| 781 | acaatttgga tagggtggtg tggaggaaac aagtctcgtg |
| | tagaagaaat tatttagtaa |
| 841 | aaaggatttt agtttttggt acttctgaat gcaaatggcc |
| | aaggaatcca gcagtttgtt |
| 901 | ggggtttctc cagacaaaaa taggctgaaa aataactaaa |
| | catgggcaaa ggagatccta |
| 961 | agaagccgag aggcaaaatg tcatcatatg cattttttgt |
| | gcaaacttgt cgggaggagc |
| 1021 | ataagaagaa gcacccagat gcttcagtca acttctcaga |
| | gttttctaag aagtgctcag |
| 1081 | agaggtggaa gaccatgtct gctaaagaga aaggaaaatt |
| | tgaagatatg gcaaaagcgg |
| 1141 | acaaggcccg ttatgaaaga gaaatgaaaa cctatatccc |
| | tcccaaaggg gagacaaaaa |
| 1201 | agaagttcaa ggatcccaat gcacccaaga ggcctccttc |
| | ggccttcttc ctcttctgct |
| 1261 | ctgagtatcg cccaaaaatc aaaggagaac atcctggcct |
| | gtccattggt gatgttgcga |
| 1321 | agaaactggg agagatgtgg aataacactg ctgcagatga |
| | caagcagcct tatgaaaaga |
| 1381 | aggctgcgaa gctgaaggaa aaatacgaaa aggatattgc |
| | tgcatatcga gctaaaggaa |
| 1441 | agcctgatgc agcaaaaaag ggagttgtca aggctgaaaa |
| | aagcaagaaa aagaaggaag |
| 1501 | aggaggaaga tgaggaagat gaagaggatg aggaggagga |
| | ggaagatgaa gaagatgaag |
| 1561 | atgaagaaga agatgatgat gatgaataag ttggttctag |
| | cgcagttttt tttttcttgt |
| 1621 | ctataaagca tttaaccccc ctgtacacaa ctcactcctt |
| | ttaaagaaaa aaattgaaat |
| 1681 | gtaaggctgt gtaagatttg tttttaaact gtacagtgtc |
| | tttttttgta tagttaacac |
| 1741 | actaccgaat gtgtctttag atagccctgt cctggtggta |
| | ttttcaatag ccactaacct |
| 1801 | tgcctggtac agtatggggg ttgtaaattg gcatggaaat |
| | ttaaagcagg ttcttgttgg |
| 1861 | tgcacagcac aaattagtta tatatgggga tggtagtttt |
| | ttcatcttca gttgtctctg |
| 1921 | atgcagctta tacgaaataa ttgttgttct gttaactgaa |
| | taccactctg taattgcaaa |
| 1981 | aaaaaaaaaa aagttgcagc tgttttgttg acattctgaa |
| | tgcttctaag taaatacaat |
| 2041 | tttttttatt agtattgttg tccttttcat aggtctgaaa |
| | tttttcttct tgaggggaag |
| 2101 | ctagtctttt gcttttgccc attttgaatc acatgaatta |
| | ttacagtgtt tatcctttca |
| 2161 | tatagttagc taataaaaag cttttgtcta cacaccctgc |
| | atatcataat gggggtaaag |
| 2221 | ttaagttgag atagttttca tccataactg aacatccaaa |
| | atcttgatca gttaagaaat |
| 2281 | ttcacatagc ccacttacat ttacaaactg aagagtaatc |
| | aatctactca aagcatggga |
| 2341 | ttattagaat caaacatttt gaaagtctgt ccttgaagga |
| | ctaatagaaa agtatgttct |
| 2401 | aacctttaca tgaggactct attctttaac tcccattacc |
| | atgtaatggc agttatattt |
| 2461 | tgcagttccc acattaaaga agacctgaga atgtatcccc |
| | aaaagcgtga gcttaaaata |
| 2521 | caagactgcc atattaaatt ttttgttgac attagtctca |
| | gtgaagacta tgaaaatgct |
| 2581 | ggctatagat gtcttttccc atttatctaa atatggactg |
| | ctcaggaaac gagactttcc |
| 2641 | attacaagta tttttaatta attgggccag cttttcaaac |
| | aaagatgcca cattcaaaat |
| 2701 | agggtatatt ttcctatatt acggtttgcc cctttataaa |
| | tccaagtaga taggaagaaa |
| 2761 | gaagacaaac tttgcatctc agtatgaatt attcaattta |
| | tttgaatgat ttttctttac |
| 2821 | aaaacaaact cattcattag tcatgtttat ctgcttagga |
| | gtttagggaa caatttggca |
| 2881 | attttgtggt tttcgagatt atcgttttct taaagtgcca |
| | gtattttaaa atagcgttct |
| 2941 | tgtaatttta cacgcttttg tgatggagtg ctgttttgtt |
| | atataattta gacttggatt |
| 3001 | ctttccattt gcatttgttt atgtaatttc aggaggaata |
| | ctgaacatct gagtcctgga |
| 3061 | tgatactaat aaactaataa ttgcagaggt tttaaatact |
| | agttaaatgg ctttcactta |
| 3121 | agaacttaag attttgttac atatttttaa atcttgtttc |
| | taataatacc tcttagcagt |
| 3181 | accttttaaa taagtataag ggatggcaaa gtttttccct |
| | ttaaaaatac tcactttatg |
| 3241 | cttataaata ggttaatggg ctgataaaag gttttgtcaa |
| | acattgcaag tattcggtgc |
| 3301 | tatatataaa ggaggaaaaa ctagttttac tttcagaatg |
| | atttaaacaa gatttttaaa |
| 3361 | aacaagatac atgcaagcga acagcagggt tagtgatagg |
| | ctgcaattgt gtcgaacatc |
| 3421 | agattttttg ttaagaggag caaatgactc aatctgattt |
| | agatggaagt ttctactgta |
| 3481 | tagaaatcac cattaatcac caacattaat aattctgatc |
| | catttaaaat gaattctggc |
| 3541 | tcaaggagaa tttgtaactt tagtaggtac gtcatgacaa |
| | ctaccatttt tttaagatgt |
| 3601 | tgagaatggg aacagttttt ttagggttta ttcttgacca |
| | cagatcttaa gaaaatggac |
| 3661 | aaaacccctc ttcaatctga agattagtat ggtttggtgt |
| | tctaacagta tcccctagaa |
| 3721 | gttggatgtc taaaactcaa gtaaatggaa gtgggaggca |
| | atttagataa gtgtaaagcc |
| 3781 | ttgtaactga agatgatttt ttttagaaag tgtatagaaa |
| | ctattttaat gccaagatag |
| 3841 | ttacagtgct gtggggttta aagactttgt tgacatcaag |
| | aaaagactaa atctataatt |
| 3901 | aattgggcca acttttaaaa tgaagatgct ttttaaaact |
| | aatgaactaa gatgtataaa |
| 3961 | tcttagtttt tttgtatttt aaagataggc atatggcata |
| | ttgattaacg agtcaaattt |
| 4021 | cctaactttg ctgtgcaaag gttgagagct attgctgatt |
| | agttaccaca gttctgatga |
| 4081 | tcgtcccatc acagtgttgt taatgtttgc tgtatttatt |
| | aattttctta aagtgaaatc |
| 4141 | tgaaaaatga aatttgtgtg tcctgtgtac ccgaggggta |
| | atgattaaat gataaagata |
| 4201 | agaaaagcgc ccatgtaaca caaactgcca ttcaacaggt |
| | atttccctta ctacctaagg |
| 4261 | aattgtaacc attgctcaga cattgtagga tttaactatg |
| | ttgaaaacta caggagaggc |
| 4321 | cgggcgcagt ggctcacgcc tgtaatccca gcactttggg |
| | aggccaaggc gggcagatca |
| 4381 | cgaggtcagg agattgagac catcctggct aacgtggtga |
| | aaccccgcct ctactaaaaa |
| 4441 | tacaaaaaat tagccaagcg tggtgctggg cgcctgtagt |
| | cccagtaact caggaggctg |
| 4501 | aggcaggaga atggcgtgaa cccgggaggc ggaggttgca |
| | gtgagccgag attgtgccac |
| 4561 | tgcactccag cctgggtgac agagcaagac tccatctcaa |
| | aaaaaaaaaa aaaacacagg |
| 4621 | agagacaact ggtttttgaa tgaaatacat gggtactgcc |
| | ttgcttgaca tcacatagtc |
| 4681 | cttgatgaaa gttcacattt aggtctgctt ggtacaatac |
| | gcctcctaaa aaggtccttg |
| 4741 | atgaaagttc acatttaggt ctgcttggta caacacgcct |
| | cctgaaaggg tctgatagct |
| 4801 | ttcagtagca gtaagacact tgcatgtgat ggtaaggtat |
| | ctgcaaattt gcacacaccg |
| 4861 | tacacagctt aagtcttaga attaacttgc taaaatgtga |
| | gcctttggta attaggctgt |
| 4921 | tttattaggg agtgtgataa tatttgaatt tcttttcata |
| | tttgtgcttt gtgtcatttt |
| 4981 | caaatgaccc ttgaaatgta ttttaaaagt agataaaagc |
| | cagaaagtga |

### Pharmaceutical Therapeutics

[0444] For therapeutic uses, the compositions or agents described herein may be administered systemically, for example, formulated in a pharmaceutically-acceptable buffer such as physiological saline. Preferable routes of administration include, for example, subcutaneous, intravenous, interperitoneally, intramuscular, or intradermal injections that provide continuous, sustained levels of the drug in the patient. Treatment of human patients or other animals will be carried out using a therapeutically effective amount of a therapeutic identified herein in a physiologically-acceptable carrier. Suitable carriers and their formulation are described, for example, in Remington's Pharmaceutical Sciences by E. W. Martin. The amount of the therapeutic agent to be administered varies depending upon the manner of administration, the age and body weight of the patient, and with the clinical symptoms of the neoplasia, i.e., the melanoma. Generally, amounts will be in the range of those used for other agents used in the treatment of other diseases associated with neoplasia, although in certain instances lower amounts will be needed because of the increased specificity of the compound. For example, a therapeutic compound is administered at a dosage that is cytotoxic to a neoplastic cell.

### Formulation of Pharmaceutical Compositions

[0445] The administration of a compound or a combination of compounds for the treatment of a neoplasia, e.g., a melanoma, may be by any suitable means that results in a concentration of the therapeutic that, combined with other components, is effective in ameliorating, reducing, or stabilizing a neoplasia. The compound may be contained in any appropriate amount in any suitable carrier substance, and is generally present in an amount of 1-95% by weight of the total weight of the composition. The composition may be provided in a dosage form that is suitable for parenteral (e.g., subcutaneously, intravenously, intramuscularly, or intraperitoneally) administration route. The pharmaceutical compositions may be formulated according to conventional pharmaceutical practice (see, e.g., Remington: The Science and Practice of Pharmacy (20th ed.), ed. A. R. Gennaro, Lippincott Williams & Wilkins, 2000 and Encyclopedia of Pharmaceutical Technology, eds. J. Swarbrick and J. C. Boylan, 1988-1999, Marcel Dekker, New York).

[0446] Human dosage amounts can initially be determined by extrapolating from the amount of compound used in mice, as a skilled artisan recognizes it is routine in the art to modify the dosage for humans compared to animal models. In certain embodiments it is envisioned that the dosage may vary from between about 1 μg compound/Kg body weight to about 5000 mg compound/Kg body weight; or from about 5 mg/Kg body weight to about 4000 mg/Kg body weight or from about 10 mg/Kg body weight to about 3000 mg/Kg body weight; or from about 50 mg/Kg body weight to about 2000 mg/Kg body weight; or from about 100 mg/Kg body weight to about 1000 mg/Kg body weight; or from about 150 mg/Kg body weight to about 500 mg/Kg body weight. In other cases, this dose may be about 1, 5, 10, 25, 50, 75, 100, 150, 200, 250, 300, 350, 400, 450, 500, 550, 600, 650, 700, 750, 800, 850, 900, 950, 1000, 1050, 1100, 1150, 1200, 1250, 1300, 1350, 1400, 1450, 1500, 1600, 1700, 1800, 1900, 2000, 2500, 3000, 3500, 4000, 4500, or 5000 mg/Kg body weight. In other aspects, it is envisaged that doses may be in the range of about 5 mg compound/Kg body to about 20 mg compound/Kg body. In other embodiments, the doses may be about 8, 10, 12, 14, 16 or 18 mg/Kg body weight. Of course, this dosage amount may be adjusted upward or downward, as is routinely done in such treatment protocols, depending on the results of the initial clinical trials and the needs of a particular patient.

[0447] Pharmaceutical compositions according to the invention may be formulated to release the active compound substantially immediately upon administration or at any predetermined time or time period after administration. The latter types of compositions are generally known as controlled release formulations, which include (i) formulations that create a substantially constant concentration of the drug within the body over an extended period of time; (ii) formulations that after a predetermined lag time create a substantially constant concentration of the drug within the body over an extended period of time; (iii) formulations that sustain action during a predetermined time period by maintaining a relatively, constant, effective level in the body with concomitant minimization of undesirable side effects associated with fluctuations in the plasma level of the active substance (sawtooth kinetic pattern); (iv) formulations that localize action by, e.g., spatial placement of a controlled release composition adjacent to or in contact with the thymus; (v) formulations that allow for convenient dosing, such that doses are administered, for example, once every one or two weeks; and (vi) formulations that target a neoplasia by using carriers or chemical derivatives to deliver the therapeutic agent to a particular cell type (e.g., neoplastic cell). For some applications, controlled release formulations obviate the need for frequent dosing during the day to sustain the plasma level at a therapeutic level.

[0448] Any of a number of strategies can be pursued in order to obtain controlled release in which the rate of release outweighs the rate of metabolism of the compound in question. In one example, controlled release is obtained by appropriate selection of various formulation parameters and ingredients, including, e.g., various types of controlled release compositions and coatings. Thus, the therapeutic is formulated with appropriate excipients into a pharmaceutical composition that, upon administration, releases the therapeutic in a controlled manner. Examples include single or multiple unit tablet or capsule compositions, oil solutions, suspensions, emulsions, microcapsules, microspheres, molecular complexes, nanoparticles, patches, and liposomes.

### Parenteral Compositions

[0449] The pharmaceutical composition may be administered parenterally by injection, infusion or implantation (subcutaneous, intravenous, intramuscular, intraperitoneal, or the like) in dosage forms, formulations, or via suitable delivery devices or implants containing conventional, non-toxic pharmaceutically acceptable carriers and adjuvants. The formulation and preparation of such compositions are well known to those skilled in the art of pharmaceutical formulation. Formulations can be found in Remington: The Science and Practice of Pharmacy, supra.

[0450] Compositions for parenteral use may be provided in unit dosage forms (e.g., in single-dose ampoules), or in vials containing several doses and in which a suitable preservative may be added (see below). The composition may be in the form of a solution, a suspension, an emulsion, an infusion device, or a delivery device for implantation, or it may be presented as a dry powder to be reconstituted with water or another suitable vehicle before use. Apart from the active agent that reduces or ameliorates a neoplasia, the composition may include suitable parenterally acceptable carriers and/or excipients. The active therapeutic agent(s) may be incorporated into microspheres, microcapsules, nanoparticles, liposomes, or the like for controlled release. Furthermore, the composition may include suspending, solubilizing, stabilizing, pH-adjusting agents, tonicity adjusting agents, and/or dispersing, agents.

[0451] As indicated above, the pharmaceutical compositions according to the invention may be in the form suitable for sterile injection. To prepare such a composition, the suitable active antineoplastic therapeutic(s) are dissolved or suspended in a parenterally acceptable liquid vehicle. Among acceptable vehicles and solvents that may be employed are water, water adjusted to a suitable pH by addition of an appropriate amount of hydrochloric acid, sodium hydroxide or a suitable buffer, 1,3-butanediol, Ringer's solution, and isotonic sodium chloride solution and dextrose solution. The aqueous formulation may also contain one or more preservatives (e.g., methyl, ethyl or n-propyl p-hydroxybenzoate). In cases where one of the compounds is only sparingly or slightly soluble in water, a dissolution enhancing or solubilizing agent can be added, or the solvent may include 10-60% w/w of propylene glycol.

### Controlled Release Parenteral Compositions

[0452] Controlled release parenteral compositions may be in form of aqueous suspensions, microspheres, microcapsules, magnetic microspheres, oil solutions, oil suspensions, or emulsions. Alternatively, the active drug may be incorporated in biocompatible carriers, liposomes, nanoparticles, implants, or infusion devices.

[0453] Materials for use in the preparation of microspheres and/or microcapsules are, e.g., biodegradable/bioerodible polymers such as polygalactin, poly-(isobutyl cyanoacrylate), poly(2-hydroxyethyl-L-glutam-nine) and, poly(lactic acid). Biocompatible carriers that may be used when formulating a controlled release parenteral formulation are carbohydrates (e.g., dextrans), proteins (e.g., albumin), lipoproteins, or antibodies. Materials for use in implants can be non-biodegradable (e.g., polydimethyl siloxane) or biodegradable (e.g., poly(caprolactone), poly(lactic acid), poly(glycolic acid) or poly(ortho esters) or combinations thereof).

### Kits or Pharmaceutical Systems

[0454] The present compositions may be assembled into kits or pharmaceutical systems for use in ameliorating a neoplasia (e.g., melanoma). Kits or pharmaceutical systems according to this aspect of the invention comprise a carrier means, such as a box, carton, tube or the like, having in close confinement therein one or more container means, such as vials, tubes, ampoules, or bottles. The kits or pharmaceutical systems of the invention may also comprise associated instructions for using the agents of the invention.

[0455] The practice of the present invention employs, unless otherwise indicated, conventional techniques of molecular biology (including recombinant techniques), microbiology, cell biology, biochemistry and immunology, which are well within the purview of the skilled artisan. Such techniques are explained fully in the literature, such as, “Molecular Cloning: A Laboratory Manual”, second edition (Sambrook, 1989); “Oligonucleotide Synthesis” (Gait, 1984); “Animal Cell Culture” (Freshney, 1987); “Methods in Enzymology” “Handbook of Experimental Immunology” (Weir, 1996); “Gene Transfer Vectors for Mammalian Cells” (Miller and Calos, 1987); “Current Protocols in Molecular Biology” (Ausubel, 1987); “PCR: The Polymerase Chain Reaction”, (Mullis, 1994); “Current Protocols in Immunology” (Coligan, 1991). These techniques are applicable to the production of the polynucleotides and polypeptides of the invention, and, as such, may be considered in making and practicing the invention. Particularly useful techniques for particular embodiments will be discussed in the sections that follow.

[0456] The following examples are put forth so as to provide those of ordinary skill in the art with a complete disclosure and description of how to make and use the assay, screening, and therapeutic methods of the invention, and are not intended to limit the scope of what the inventors regard as their invention.

### Examples

### Example 1: Molecular Signatures of Resistance (No Benefit)

[0457] First, expression data from a previously published cohort of pre-ipilimumab treated melanoma patients (Cohort 1) was analyzed (Van Allen et al., 2015 Science, 350(6257):207-11, incorporated herein by reference). The patients were classified into three groups based on their post-treatment outcome: (i) patients who achieved complete or partial response by Response Evaluation Criteria in Solid Tumors (RECIST) criteria or stable disease by RECIST criteria with overall survival greater than one year (“clinical benefit/CB;” n=13); (ii) patients who had progressive disease by RECIST criteria or stable disease with overall survival less than 1 year (“no benefit/NB;” n=22); and (iii) patients showing early progression on ipilimumab (progression-free survival (PFS)<6 months) with overall survival >2 years (“long-term survival with no clinical benefit/LTS;” n=5). The LTS group was removed from the differential expression analysis for three reasons: 1) their unique clinical course suggests a potentially different clinicobiology; 2) the small number of samples precludes any meaningful comparisons with the other two groups; and 3) the focus was purely on expression patterns distinguishing clear benefit from clear resistance. Therefore, an unbiased differential gene expression analysis was performed between the CB and NB groups. Because of the limited number of patients, the statistical stringency was relaxed in the unbiased differential expression analysis by forgoing multiple hypothesis correction. Using a cutoff of 2-fold difference between the absolute medians of the two groups (unadjusted Mann-Whitney p<0.05), 975 genes co-enriched in the ‘no benefit’ tumors (FIG. 1A) were identified.

[0458] Strikingly, 8 of the top 10 genes enriching 60-180 fold in ‘NB’ tumors clustered within a narrow 75 Kb region of chromosome Xq28 (FIG. 1A, FIG. 1B, FIG. 12A), representing 0.0023% of the human genome. All 8 genes (MAGEA3, MAGEA6, CSAG1, MAGEA12, MAGEA2, CSAG2, and CSAG3 and CSAG4) encoded cancer-germline antigens (CGAs), a large family of 140 members notable for their restricted expression in testis and placenta but re-expression across many tumor types. While many subclusters of CGA's are located on Xq28, this particular subcluster has demonstrated an expression pattern independent of surrounding CGA clusters; in fact, the synchronous expression of these 8 clustered genes may be driven by their unique inverted repeat DNA structure. 14/22 NB tumors showed upregulation of at least one of these 8 CGA's versus 2/13 CB tumors (p=0.0125).

[0459] In addition to the CGA cluster on Xq28, increased expression of additional CGAs was identified in NB samples, though none were as highly expressed as those at the CRMA locus (Table 2, FIG. 14). Moreover, previously described melanoma antigens, such as NY-ESO-1, whose humoral and cellular responses have been linked to clinical outcome (Yuan et al., 2011), or differentiation antigens (e.g. TYR, TYRP1, PMEL, and MLANA), were not differentially expressed (FIG. 14). Multiple genes involved in immune suppression enriched in ‘no benefit’ tumors, in particular another family of embryonically-restricted genes known as the pregnancy-specific glycoproteins (PSG1, PSG2, PSG4, PSG5, PSG6, PSG7, PSG8, PSG9, and PSG11; 7-48 fold). Secreted by the syncytiotrophoblasts of the placenta during pregnancy, the PSGs impair T cell proliferation and secrete the immunosuppressive cytokines IL-10 and TGF-B1, presumably to drive a locally immunosuppressive microenvironment required for fetal tolerance. Moreover, multiple subunits of the GABA A receptor, which has been implicated in mediating suppression of inflammatory macrophages and anti-tumor T cells, were also enriched in nonresponding tumors (GABRA3, GABRB1, GABRB2, GABRG2, GABRQ, and GABRR1; 2-108 fold). In contrast, no components of the GABA B receptor were similarly enriched, consistent with its lack of demonstrative immunosuppressive activity.

[0460] Other differentially expressed genes corresponding to anti-CTLA4 resistance included epithelial-to-mesenchymal transition (CLDN1, CLDN2, EYA1, SNAI1, TGFB2, WNT3), embryonic development/differentiation (HOXD13, HOXD11, HOXA2, HOXA5, HOXD10), angiogenesis (ANGPT1, ANG2, PDGFA), and extracellular matrix (PCDHB2, PCDHB3, PCDHB6, PCDHB10, PCDHGA3, PCDHGB1, PCDHGB2, EMILIN1, TNN). Genes listed in Table 2.

[0461] Next, another previously published clinical cohort consisting of chemotherapy-naïve responding (n=4) and resistant (n=2) pre-anti-CTLA4 melanomas (confirmation cohort) was queried (Snyder et al., 2014 The New England Journal of Medicine, 371(23):2189-99, incorporated herein by reference). Here too, CGA's from the Xq28 locus were upregulated in resistant tumors (FIG. 1B), confirming previous findings.

[0462] To further validate these results in a larger cohort, the transcriptomes of 473 metastatic melanomas from The Cancer Genome Atlas (TCGA) were analyzed, dividing them into “CGA-Xq28 high” and “CGA-Xq28 low” groups based on their expression of these 8 CGA's (Cancer Genome Atlas N. Genomic Classification of Cutaneous Melanoma. 2015 Cell, 161(7):1681-96, incorporated herein by reference). A statistically significant overlap was identified between genes co-enriched with the CTA-Xq28 locus in TCGA and genes enriched with nonresponding pre-anti-CTLA4 tumors (p<10⁻¹⁶) (TABLE 3, 4). As expected, no overlap was seen between “CGA-Xq28 high”-associated genes in TCGA and genes associated with responding tumors (p=1) (FIG. 1C).

[0463] Similarly, significant overlaps were identified between “CGA-Xq28 low”-associated genes in TCGA and genes associated with clinical benefit (p=1.6×10⁻⁵) but no overlaps with genes associated with “no benefit” tumors (p=1). Thus the enrichment of these 8 CTA's from the Xq28 locus in primary resistant melanomas to anti-CTLA4 therapy is consistently observed among three different cohorts.

[0464] The cohort was heavily pretreated with dacarbazine (DTIC) or temozolamide, two epigenetic modifiers. However, no effect of history of DTIC/temozolamide treatment on clinical outcome was identified (FIG. 9).

[0465] Because CGA expression is known to be regulated by DNA methylation (Sigalotti et al., 2002 Journal of immunotherapy, 25:16-26; Fratta et al., 2011 Molecular oncology, 5:164-82), locus specific methylation analysis was performed for the promoters of MAGEA3 and MAGEA6 as well as unique methylation sites within the gene bodies of MAGEA3, MAGEA6, and MAGE12. Within NB samples, significantly decreased DNA methylation was observed throughout the promoters for the MAGEA3 and MAGEA6 genes (FIG. 3A; n=3 CB vs n=3 NB, p=3×10⁻⁶) suggesting that methylation status of the Xq28-CGA locus is associated with clinical outcome to ipilimumab.

[0466] To further investigate DNA methylation patterns associated with CRMA expression, methylation data from TCGA melanoma samples was queried. Differential methylation analysis of 485,577 probes between samples with high and low expression of the CRMA locus (see STAR Methods for details) revealed 47 probes relatively hypermethylated in the “CRMA-high” group compared to 65,467 in the “CRMA-low” group (FIG. 3B). These 65,467 probes mapped across the genome, suggesting global hypomethylation in melanoma samples with high CRMA expression (FIG. 13B). Furthermore, methylation-specific PCR of MAGE-A2, MAGE-A3, and MAGE-A12 show decreased methylation in non-responding patients (FIG. 13A). Methylation status of the CRMA locus may therefore also be associated with clinical outcome to ipilimumab.

### Example 2: Molecular Signatures of Response (Clinical Benefit)

[0467] Using a cutoff of 2-fold difference between the absolute medians of the two groups (nominal Mann-Whitney p<0.05), 175 protein-coding genes and 8 RNA genes co-enriched in the ‘clinical benefit’ tumors were identified. As the most upregulated gene, microRNA-211 (miR-211) was detected over 700-fold compared to ‘no benefit’ tumors (FIG. 1A, 4A). Housed within the melastatin gene (TRPM1, which was also upregulated over 30-fold), miR-211 has been recently discovered to account for the well-described tumor suppressive activity of melastatin by reducing melanoma invasive activity through effects on multiple processes including the TGF-beta signaling pathway. Indeed, among all 8 melastatin family members, only TRPM1 (FIG. 4A) was significantly enriched in ‘clinical benefit’ tumors. To evaluate whether miR-211 served a prognostic and/or a predictive role in the cohort, miR-211 levels were compared only between patients with a complete or partial response versus progressive disease. All patients with stable disease were removed from the analysis. Notably, it was observed that miR-211 levels remained significantly upregulated in the complete response/partial response group versus the progressive disease group, suggesting its ability to predict ipilimumab response in addition to prognosticating a more indolent clinical course. We also found miR-185 and miR-513a2 to be upregulated 24 and 31-fold respectively.

[0468] In contrast to the immunosuppressive nature of genes associated with primary resistance, an inflammatory, activated immunologic response was identified in the tumor microenvironment of ‘clinical benefit’ tumors, consistent with previous findings (FIG. 1B, 4B). Of 428 genes enriched in responding tumors, 174 (60%) were identified as immune-related. In contrast, in nonresponding tumors, only 17 of 975 (3%) protein-coding and RNA-associated genes were immune-related (FIG. 4B, 11C).

[0469] These immune-related genes were classified as involved in T cell infiltration (CD2, CD6, CXCL13), receptor signaling (CD3D, CD3E, CD3G, LCK, and T cell receptor alpha and beta genes [n=19]), activation (CD28, ICOS, EOMES, IL2RB, FASLG, SLAMF6), and cytotoxicity (GNLY, GZMA, GZMB, GZMH, GZMK, PRF1). Interestingly, an enrichment of immature T cells was noted from increased expression of the pre-T cell receptor alpha chain (PTCRA). Additionally, a striking number of immunoglobulin heavy and light chain genes (n=33) were upregulated in ‘clinical benefit’ tumors, thereby implicating humoral immunity (CD19, CD72, FCRL1/3, MS4A1). Dysfunction of a diverse immune infiltrate was suggested by enrichment of immune inhibitory receptors specific to or preferentially expressed by T cells (CTLA4, LAG3), B cells (CTLA4, FCRL1, FCRL3), macrophages (CD5L) and eosinophils/mast cells (SIGLEC8), depicting a paralyzed anti-tumor immune infiltrate. Also, upregulation of FAIM3/TOSO, the Fc receptor for IgM that is expressed on B and T cells, was observed. Recently, single cell transcriptomic studies implicated both FAIM3 and CD5L as key regulators of Th17 pathogenicity.

[0470] To validate the association of miR-211 with clinical benefit, TCGA melanoma transcriptomes were queried. It was identified that genes co-enriched with miR-211 significantly overlapped with genes enriched in clinically benefiting tumors (p=2.5×10⁻¹³) whereas no significant overlap was seen between genes co-enriched with miR-211 and genes enriched in resistant tumors (p=0.99) (FIG. 4C). Investigating the 22 genes that co-enriched with both response in the clinical cohort and miR-211 expression in TCGA, CD5L, IL12RB2, FAIM3, and PTCRA emerged, confirming the association of anti-CTLA4 response, miR-211 expression and diverse immune subpopulations. As described herein, miR-185 and miR-513A2 were significantly upregulated in clinically benefiting tumors (FIG. 4D). Furthermore, because all three miRs induce a proliferative melanoma phenotype while suppressing the invasive phenotype, the enrichment of proliferative and invasive gene signatures with clinical outcomes were investigated. It was identified that proliferative signatures significantly enrich in clinically benefiting tumors, while invasive signatures significantly enrich in no benefit tumors (FIG. 4E).

### Example 3: Molecular Signatures of Clinical Outcome to CTLA4 Blockade are Unique and can Discriminate Response and Resistance

[0471] Although studies have suggested common genomic signatures of response (i.e. neoantigen load and clonality) for both CTLA4 and PD1 pathway blockade, the immunobiological processes driven by these two molecules are distinct. Thus, it was hypothesized that the transcriptional signatures of response and resistance to CTLA4 blockade would be unique and not shared with PD1 pathway antagonists. Recently, the genomic and transcriptomic features of response to anti-PD1 therapy in melanomas were reported (Hugo et al., 2016 Cell, 165(1):35-44, incorporated herein by reference). Expression of the Xq28 CTA's and miR-211 were interrogated in these cohorts; however, no correlation with clinical outcome (FIG. 5A-5C) was identified, confirming the hypothesis that the signatures of response and resistance to CTLA4 blockade are unique to anti-CTLA4 therapy and not shared with anti-PD1 therapy. Indeed, molecular signatures of innate resistance to PD1 blockade were also recently shown not to predict resistance to CTLA4 blockade. These results are consistent with the notion that the CTLA4 and PD1 pathways are biologically and clinically distinct.

[0472] To evaluate the ability of these gene expression signatures to accurately discriminate clinical outcome to CTLA4 blockade, the correlation of the greatest expression value from the Xq28 CGA cluster (comprising genes MAGEA2, MAGEA3, MAGEA6, MAGEA12, CSAG1, GSAG2, and CAG3) was evaluated with expression of miR-211 for all 40 patients from Cohort 1, including the long-term survivors with no clinical benefit, thus examining a “real world” scenario (FIG. 6A). Also, a receiver-operator characteristic (ROC) analysis using the combined classifier of “Xq28+miR-211” was performed. The “Xq28+miR-211” classifier was created by combining expression of the maximally expressed gene in the Xq28 CGA cluster and miR-211 expression in a logistic regression model. Non-responders were characterized by high Xq28 CGA expression and low miR-211 expression. This “Xq28+miR-211” classifier more accurately discriminated patient outcomes than either neoantigen load or CTLA4 expression (FIG. 6B). In fact, AUCs of the latter two reached 0.68 while the new classifier achieved an AUC of 0.85. At 100% sensitivity, using neoantigen load or CTLA4 expression reached only 0% or 27% specificity whereas the new classifier achieved 40% specificity. A Kaplan-Meier analysis of post-ipilimumab overall survival demonstrated no significant effect of combining neoantigen load with CTLA4 gene expression (p=0.1) whereas the Xq28+miR-211 classifier significantly distinguished two clinical groups (p=0.005), especially in addition to both neoantigen load and CTLA4 expression (p=0.0003) (FIG. 6C). In summary, the expression analysis described herein uncovered transcriptomic determinants (i.e., biomarkers) of clinical outcome to CTLA4 blockade that outperform previously identified correlates and illuminate additional mechanisms of response and resistance.

### Example 4: Cancer-Germline Antigens Discriminate Clinical Outcome to CTLA4 Blockade in a Validation Cohort and on the Protein Level

[0473] While the discovery cohort was generated from formalin-fixed samples from an observational, retrospective study, the findings were validated in an independent RNA-seq data set generated from cryopreserved tumors from a prospective, randomized trial using pre-treatment patient samples derived from the CheckMate 064 trial (Weber et al., 2016) (see STAR Methods for details). Again, the CRMA genes were amongst the most significantly upregulated genes (FIG. 2A-2B). Because overall survival data attributable to ipilimumab monotherapy was not available given the subsequent administration of nivolumab, the discovery cohort was re-classified based on response assessments used for the CheckMate 064 trial with “progressive disease (PD)” and “no PD” groups. RNA-seq expression values from the validation cohort were available for 5 of 8 genes in the CRMA locus (MAGEA3, MAGEA2, MAGEA2B, MAGEA12, and MAGEA6), and consistent and significant increases were observed in all of these genes in patients with PD in both discovery and validation cohorts (FIG. 2A-2B; 12B-C).

[0474] Because of prior reports of discordance between cancer-germline RNA and protein expression across cancers (Chen et al., 2014), immunohistochemistry (IHC) was performed on NB and CB samples using the MAGE-A antibody (clone 6C1), which is broadly reactive for gene products from the MAGE-A family recognizing MAGEA1, A2, A3, A4, A6, A10 and A12. IHC analysis demonstrated that the NB cohort comprised a significantly higher proportion of MAGE-A+ tumors compared to the CB cohort (FIG. 2C-2D, 73% vs 40%, p<0.05), consistent with the RNA-seq analysis. Thus, primary resistance to ipilimumab is strongly associated with baseline RNA and protein expression of a specific cluster of MAGE-A genes.

[0475] Detectable MAGE-A protein expression associated with inferior overall survival after ipilimumab therapy (FIG. 6D). In a multivariable analysis of these 40 patients that included evaluation of neoantigen load, CRMA expression emerged as the sole independent risk factor for poor outcome after ipilimumab therapy (Cox proportional-hazards model, p=0.018; FIG. 6E). Finally, CRMA expression did not discriminate overall survival in the untreated TCGA melanoma cohort, suggesting that the CRMA signature is potentially predictive for post-ipilimumab survival rather than prognostic for a clinically aggressive natural history (FIG. 6F). Taken together, these data suggest CRMA expression as a transcriptomic determinant of clinical outcome to CTLA4 blockade.

[0476] To control for potential artifacts from whole transcriptome RNA-seq (e.g. cDNA library synthesis, read alignment), results were confirmed by gene-specific RT-qPCR of the original tumor RNA in the discovery set using three different housekeeping genes (FIG. 7). To investigate potential mechanisms underlying the transcriptional enrichment of CRMA genes in resistant tumors, copy number variation and DNA methylation at this locus in the clinical trial samples was analyzed. No copy number alterations of this region based on analysis of matched whole-exome sequencing (WES) data were observed (FIG. 8). Neither gender nor prior exposure to cytotoxic therapy (i.e. dacarbazine/temozolomide) was associated with clinical outcome (FIG. 9; 10A). Using the ABSOLUTE algorithm (Carter et al., 2012), similar tumor purity estimates were identified in both patient groups, suggesting that relative enrichment of cancer cells in the NB group was unlikely to be an explanation for this finding (FIG. 10B).

### Example 5: MAGE-A Proteins May Degrade the Danger Molecule HMGB1

[0477] Although MAGE proteins have often been studied as immunotherapeutic targets bound to HLA molecules on the cell surface (Van Der Bruggen et al., 2002), recent studies have attributed them with key oncogenic capacities. Expression of MAGE-A3/A6 is necessary for cancer cell viability and can be sufficient to transform cells (Pineda et al., 2015). Critical to the oncogenic functions of MAGEs may be their defining ability to bind to and potentiate the activity of various E3 ubiquitin ligases (Lee and Potts, 2017). MAGE-A2, MAGE-A3, and MAGE-A6 all share specific binding to the TRIM28 ubiquitin ligase. Multiple groups have demonstrated MAGE-TRIM28-induced ubiquitination and proteasomal degradation of the p53 tumor suppressor protein (Doyle et al., 2010) and more recently the AMPK complex which controls cellular metabolic pathways such as autophagy (Pineda et al., 2015).

[0478] As described herein, the MAGE-A genes within the CRMA locus may target proteins that are involved in immune priming (governed partly by the CTLA4 pathway) rather than immune effector function (governed partly by the PD1 pathway). The results of a screen for direct substrates of MAGE-A through in vitro ubiquitination reactions on protein microarrays containing >9000 recombinant proteins were previously reported (Pineda et al., 2015). As a significantly ubiquitinated target of the MAGE-TRIM28 complex, high-mobility group box 1 (HMGB1) emerged as a likely candidate for its well-described roles in both autophagy and immunogenic cell death that is required for dendritic cell-mediated priming of an adaptive immune response (Apetoh et al., 2007; Tang et al., 2010) (FIG. 11A). To investigate whether HMGB1 was a potential target of the MAGE-TRIM28 complex in melanoma tumors in vivo, immunofluorescence (IF) staining using both anti-HMGB1 and anti-MAGE-A antibodies (along with DAPI) was performed on tumor sections from 5 NB and CB tumors as well as a xenograft from the A375 human melanoma cell line (FIG. 11B). IF staining revealed the mutually exclusive expression of HMGB1 and MAGE-A proteins, with ubiquitous expression of HMGB1 protein in 3 of 3 MAGE-A negative/CB tumors and absent HMGB1 expression in 2 of 2 MAGE-A positive/NB tumors and the A375 human xenograft.

[0479] As a well-described damage-associated molecular pattern (DAMP), HMGB1 has been demonstrated to recruit a diverse inflammatory response by binding various toll-like receptors. In particular, HMGB1 can bind dsDNA to form immune complexes recognized by TLR9, resulting in secretion of immunostimulatory cytokines and proliferation of B cells (Avalos et al., 2010; Tian et al., 2007). Consistent with these studies, evidence for an inflammatory, activated immunologic response was identified in the tumor microenvironment of CB samples. Of 326 genes enriched in CB samples, 182 (55%) were identified as immune-related through manual curation, compared to only 16 of 457 (3.5%), in NB samples (Fisher's exact test, p<0.0001; FIG. 11C). In order to test the mutually exclusive expression of MAGE-A and HMGB1 proteins in melanoma, immunofluorescence staining was performed on a melanoma tissue microarray (TMA) comprising 100 samples (9 benign nevi tumors, 91 primary and metastatic melanomas) using antibodies against MAGE and HMGB1. The fraction of HMGB1 positive cells were comparable in MAGE negative cells from the benign nevi and malignant tumors, but was significantly reduced in cells from MAGE malignant samples ((26% and 31% vs 8%, Chi-square test p<2.2×10⁻¹⁶ FIG. 15A). Additionally, in 13 out of 15 melanomas that had any MAGE positive cells, at least 85% of MAGE+ cells lack HMGB1 (FIG. 15B). Supporting the finding that the MAGE-TRIM28 complex degrades HMGB1, significantly decreased expression of HMGB1 pathway genes (TLR9 and IL12A) was identified in no benefit tumors (FIG. 16).

[0480] Furthermore, to interrogate immune subpopulations, their involvement was computationally inferred using recently collated gene sets describing specific immune subsets (Angelova et al., 2015). Multiple B and T cell subpopulations were significantly enriched within CB transcriptomes comprising activated, immature and mature B cells along with central memory CD4+ T cells, effector memory CD8+ T cells, T helper 1 and 2 cells, gamma-delta T cells, and T regulatory cells (FIG. 11D). In addition, upregulation of genes related to T cell infiltration, T cell receptor signaling, humoral immunity and macrophage infiltration was also observed (Table 2). No immune subsets were significantly enriched in NB samples. Thus, the CRMA locus may contribute to ipilimumab resistance through targeted destruction of the DAMP, HMGB1, whose absence may restrain the initiation of an adaptive immune response.

[0481] Finally, to ascertain whether the MAGE-TRIM28 complex can suppress autophagy in melanoma, LC3B and p62 staining in MAGE-A stained melanomas was examined. Significantly reduced expression of the autophagy marker LC3B was identified in MAGE-A+ melanomas (FIG. 17A). Moreover, increased evidence of absent or impaired autophagy was found in 100% of MAGE-A positive melanomas (FIG. 17B).

### Discussion

[0482] MAGE family members were first identified as targets of anti-tumor T cells in melanoma, and their restricted expression in immune-privileged gonadal tissues and various tumor types highlighted them as immunogenic targets (Coulie et al., 2014; De Plaen et al., 1994; Simpson et al., 2005; van der Bruggen et al., 1991). Therefore, the findings of a specific subcluster of MAGE-A genes overexpressed in melanomas resistant to CTLA4 blockade were unexpected. However, clinical efforts to immunotherapeutically target these proteins have yielded mixed results, suggesting their in vivo immunogenicity should not be assumed (Vansteenkiste et al., 2016). Indeed, many groups have demonstrated the association of CGAs and especially the MAGE family with poor prognostic features in melanoma such as ulceration, thickness, metastases and progression in contrast to the positive prognosis afforded by immune infiltration (Azimi et al., 2012; Barrow et al., 2006; Roeder et al., 2005).

[0483] One possible explanation for these results is that reduced Xq28-CGA expression in responding tumors is a manifestation of effective anti-MAGE-A immune activity. Responding melanoma samples are characterized by immune infiltrates that may have already selected against tumor cells expressing high levels of Xq28-CGA genes. However, it was observed that other melanoma antigens previously demonstrated to elicit cellular and humoral responses, such as NY-ESO-1 (another cancer-germline antigen) and various differentiation antigens, showed no evidence of selection in the analysis (FIG. 14). This particular MAGE-A subfamily has not been shown to provoke stronger immune responses than other cancer-germline or melanoma-associated antigens. As described herein, further investigation of in situ immune responses is pursued to rule out this possibility.

[0484] An alternative explanation is that these particular Xq28-CGA genes induce immune resistance. Recently described cell-intrinsic functions for MAGE-A3/A6 have implicated these proteins in oncogene addiction, the ubiquitination of key tumor suppressors—notably TP53 and AMPK—that contribute to oncogenesis, and the repression of autophagy (Doyle et al., 2010; Pineda et al., 2015). As described herein, degradation of a protein involved in immune priming (governed in part by the CTLA4 pathway) as opposed to immune effector function (mediated partly by the PD1 pathway) might explain the specificity of the Xq28-CGA cluster to CTLA4, but not PD1, blockade. In fact, an in vitro screen of ubiquitination targets of the MAGE-A3/6-TRIM28 E3 ubiquitin ligase revealed HMGB1, a damage-associated molecular pattern (DAMP) intimately involved in induction of cellular autophagy and immunogenic cell death (FIG. 11A-FIG. 11C) (Apetoh et al., 2007; Scaffidi et al., 2002; Tang et al., 2010; Yanai et al., 2009). Within responding tumor transcriptomes, upregulation of several B and T cell expression signatures were consistent with the immunostimulatory function of HMGB1 (Avalos et al., 2010; Ivanov et al., 2007; Li et al., 2013).

[0485] Binding of DAMPs to pattern recognition receptors (such as TLR family members) serve as ‘signal 0’ to kick-start the adaptive immune response through dendritic cell (DC) maturation and migration to the lymph nodes. There, DCs mediate antigen recognition by T cells (‘signal 1’), upregulate costimulatory receptors (‘signal 2’) and secrete polarization and differentiation cytokines (‘signal 3’) (Tang et al., 2012; Yatim et al., 2017). HMGB1 has been identified as a ‘signal 0’ that critically mediates immunogenic cell death—a process that has been proposed to rely on a combination of both antigenicity and adjuvanticity, the former conferred by neo-antigens (in tumors) and the latter provided by specific DAMPs (Galluzzi et al., 2017). Although melanomas have high neoantigen loads that correlate with response to checkpoint blockers, a defect in pathways required for cell death-associated release of DAMPs might decrease the adjuvanticity, and thus the overall immunogenicity, of a tumor. Importantly, both MAGE-A3/A6 and HMGB1 have been demonstrated to induce autophagy (Pineda et al., 2015; Tang et al., 2010), which is necessary for efficient dendritic cell cross-presentation of tumor antigens (Li et al., 2008). Indeed, short-hairpin RNA (shRNA)-mediated knockdown of HMGB1 or essential components of autophagy can abrogate immunogenic cell death (Apetoh et al., 2007; Michaud et al., 2011). Furthermore, loss-of-function polymorphisms in HMGB1-binding receptors or HMGB1 loss from malignant cells associate with poor outcome in patients treated with chemotherapeutic agents known to induce immunogenic cell death (Ladoire et al., 2015) and even in melanoma patients treated with DC-based vaccines (Tittarelli et al., 2012). Consequently, disabling the emission of danger signals such as HMGB1 may allow Xq28-CGA-expressing melanomas to inhibit the initiation of an adaptive immune response and impede the efficacy of CTLA4 blockade. Careful dissection of the role of MAGE-A-HMGB1 interactions in mediating outcome to CTLA4 blockade unveils new strategies to improve clinical responses to ipilimumab, for example through combination with HMGB1 receptor agonists.

[0486] Although the statistical stringency was relaxed because of the small discovery cohort, the finding of Xq28-CGA gene upregulation in primary resistance to CTLA4 blockade was validated through confirmation in a prospective, independent cohort and technical verification by qPCR and immunohistochemistry. Because both CTLA4 blockade and cancer vaccines impact immune priming and memory formation, the results presented herein may also explain the long history of unsuccessful cancer vaccination efforts targeting MAGEA3 and MAGEA6 (Palucka and Banchereau, 2014; Pedicord et al., 2011; Saiag et al., 2016; Vansteenkiste et al., 2016). The results presented herein also indicate that mechanisms of response and resistance to immune priming (e.g. CTLA4 blockade) may differ substantially from those relevant to clinical manipulation of effector immunity (e.g. PD1/PD-L1 blockade). As immunotherapeutic combinations are increasingly evaluated, understanding these mechanisms is important for precisely pairing patients with appropriate combinations to avoid toxicity and ensure efficacy. Nevertheless, these findings are investigated in larger, prospective cohorts to evaluate these signatures as potential biomarkers of outcome, and studied in preclinical models as potential therapeutic targets to sensitize to or combine with CTLA4 blockade.

### STAR Methods

[0487] The following materials and methods were used in this example.

### Study Design

[0488] A previously reported RNA-seq dataset of pre-therapy samples collected from a study cohort of 40 melanoma patients treated with ipilimumab (Van Allen et al., 2015) was analyzed. In this study, RNA and genomic DNA were extracted from formalin-fixed, paraffin-embedded (FFPE) tumor blocks, and Illumina's TruSeq Stranded Total RNA Sample Prep Kit was used to generate RNA-seq libraries. Patient classification was maintained from the original report (Table 1). The “clinical benefit” (CB) group (n=13) was defined as patients who achieved complete or partial response by RECIST criteria, or stable disease by RECIST criteria with overall survival greater than one year. The “no benefit” (NB) group (n=22) was defined as patients who had progressive disease by RECIST criteria or stable disease with overall survival less than 1 year. A third group of five patients was described with early progression on ipilimumab (progression-free survival <6 months) but overall survival exceeding 2 years. To identify genes associated with clinical benefit and no benefit, the differential expression analysis between the CB and NB groups was performed. The association of Xq28-CGA expression with survival outcome was evaluated in the entire cohort. Genes were identified as differentially expressed when their median expression differed by more than two-fold with a nominal one-sided p-value≤0.05 (Wilcoxon test).

[0489] An independent, validation cohort comprised 41 patients from the CheckMate 064 trial (Weber et al., 2016) treated with ipilimumab followed by nivolumab (Table 1). The trial also studied in parallel a cohort comprising patients treated with the reverse sequence of nivolumab followed by ipilimumab. Overall survival could not be assessed in this crossover design. Response assessments, collected at week 13 before the planned switch, were used to classify patients into either no progressive disease (“No PD”; comprising stable disease, complete response and partial response, n=12) or progressive disease (“PD”; n=29) from each arm. Tumor samples were cryopreserved in RNALater. RNA-seq libraries were generated using the Stranded TruSeq method, and 75 bp paired-end reads for duplexed samples were sequenced per lane (Expression Analysis, Inc; Morrisville, N.C.). RNA-Seq and associated clinical data were available for the following Xq28-CGA genes: MAGEA3, MAGEA2, MAGEA2B, MAGEA12, MAGEA6.

[0490] Xq28-CGA expression was evaluated in patients from two different anti-PD1-treated cohorts. Anti-PD1 cohort 1 comprised 28 pre-anti-PD1-treated tumors (Hugo et al., 2016); anti-PD1 cohort 2 comprised 37 pre-treatment tumors from the nivolumab followed by ipilimumab arm of the CheckMate064 trial (Hugo et al., 2016; Weber et al., 2016) (Table 1).

[0491] 465 melanoma samples from TCGA (Cancer Genome Atlas, 2015) were used to further investigate identified gene expression and methylation signatures.

### Processing and Analysis of Sequencing Data

[0492] RNA sequencing data from the discovery cohort was aligned to the reference human genome with STAR (Dobin et al., 2013), followed by removal of duplicates and quantification with RSEM (Li and Dewey, 2011). RNA sequencing data from the CheckMate064 trial was first aligned using STAR (Dobin et al., 2013) followed by removal of duplicate reads. Gene level quantification of the reads was performed with the htseq-count tool (Anders et al., 2015).

[0493] Whole exome data for 110 patients from the discovery cohort (including the 40 with transcriptomic data) (Van Allen et al., 2015) and Infinium 450K methylation chip data for 476 samples from TCGA (Cancer Genome Atlas, 2015) was also obtained.

Identification of Genes Associated with Xq28-CGA Expression in TCGA

[0494] A metagene was defined as one comprising the following Xq28-CGA genes: MAGEA2, MAGEA3, MAGEA6, MAGEA12, CSAG1, CSAG2, and CSAG3 (MAGEA2B was not quantified by TCGA). The expression of this metagene was defined as the geometric mean of its components and was computed for each of 465 TCGA melanoma samples. TCGA samples with expression values in the bottom and top quartiles for this metagene were classified into “Xq28-CGA-low” (n=117) and “Xq28-CGA-high” (n=116) groups respectively. An unbiased gene expression analysis between these two groups was performed using one-sided Wilcoxon tests with a false discovery rate (FDR) threshold of 0.05 and two-fold change threshold.

### Validation of Genes by Quantitative Polymerase Chain Reaction

[0495] Expression of target genes in the discovery cohort (Van Allen et al., 2015) from RNA that was extracted for RNA-sequencing was validated. TaqMan gene expression assays (Applied Biosystems, Foster City, Calif.) was used and cDNA amplification was performed using the TaqMan Gene Expression Master Mix (Applied Biosystems) on an Applied Biosystems 7500HT Fast real-time polymerase chain reaction (PCR) System (10-minute enzyme activation and 40 cycles of 15 s at 95° C., 1 minute at 60° C.). Samples were measured in duplicate; “undetermined” values were assigned a cycle threshold (Ct) of 40. HPRT1, GAPDH, and PGK1 were used as housekeeping genes to calculate relative expression values according to the delta-Ct method.

### Identification of Differentially Methylated Probes Between Xq28-CGA-Low and -High Groups in TCGA

[0496] Level3 Infinium 450K methylation chip data was retrieved from TCGA for “Xq28-CGA-low” (n=117) and “Xq28-CGA-high” (n=116) groups. A probe-level comparison was performed between the two groups using Wilcoxon tests with an FDR of 0.05 for all 485,577 CpG probes. A probe with higher median beta values in one group was considered relatively hypermethylated in that group compared to the other.

### Copy Number Analysis

[0497] The clinical benefit (CB) and no benefit (NB) groups were tested for variations in germline and somatic CNVs in Xq28 locus using GATK 4 target coverage denoising and ACNV pipelines. Raw coverage on whole exome Agilent targets for 110 normal and tumor samples was collected and GC bias was corrected for. The 40 samples with RNA-seq data used in this study were set aside and the remaining 70 samples were used to learn the target coverage bias profile (“panel of normals”). Then, the coverage profile of samples used in this study were denoised and normalized using the obtained panel of normals. Tumor samples with anomalously low signal-to-noise ratio and normal samples with significant contamination were detected and excluded from the analysis. Empirical distributions of raw copy ratios on all 16 Agilent targets in the Xq28 locus were calculated using an agnostic prior distribution and copy ratio likelihoods for each sample. Absolute copy ratios with respect to diploid were estimated by performing allelic CNV analysis, detecting copy neutral autosomal intervals, and normalizing the raw copy ratios accordingly.

[0498] The two groups were tested for germline and somatic copy number variations in the Xq28 locus using the two-sample KS test. The test was performed separately for each target, and for the copy ratio average on all 16 targets in the Xq28 locus. The copy ratio distributions in each case were identified via empirical bootstrap.

### Amplicon Methylation Analysis

[0499] Genomic DNA samples of male patients was bisulfite-treated (EZ DNA Methylation-Gold™ Kit, Zymo Research) and individual amplicons were amplified via PCR (using TaKaRa EpiTaq™ HS, Clonetech). The following primer pairs were used: MAGEA3, MAGEA6 and MAGEA12 gene body, Forward Primer: GATTGTGTTTTTGAGGAGAAAATTT (SEQ ID NO: 206), Reverse Primer: CTCCCACTAACCCTAACTACAACTC (SEQ ID NO: 207). MAGEA3 and MAGEA6 gene promoter, Forward Primer: AATTTTAGGATTTTGAGGGATGAT (SEQ ID NO: 208), Reverse Primer: AAACCCTCTATCTAAAATAAAACCC (SEQ ID NO: 209). PCR products were subcloned (One Shot® TOP10 Chemically Competent E. coli, NEB) and individual colonies were sequenced for subsequent methylation analysis. For the local regression analysis (R package ‘msir’) the span smoothing parameter for loess was set to 0.4.

### Immunohistochemistry (IHC) and Immunofluorescence (IF)

[0500] All specimens were evaluated by conventional histopathology. Antibodies used for IHC and IF included mouse anti-MAGE antibody (6C1; Santa Cruz Biotechnology, San Diego, Calif. USA) and rabbit anti-HMGB1 antibody (ab18256; Abcam, Cambridge, Mass.). Immunohistochemistry was performed with pressure cooker heat-induced epitope retrieval on 4-mm-thick sections prepared from formalin-fixed, paraffin-embedded tissues. In addition to detection of biomarker antibodies by use of chromogen vector NovaRed peroxidase substrate (Vector laboratory, Burlingame, Calif., USA), selected samples were evaluated by a dual labeling approach by combining NovaRed with a blue chromogen vector Blue AP substrate (Vector laboratory). Positive and negative tissue controls and isotype-specific irrelevant antibody controls were used to ensure specificity. Consistent with other reports of IHC for MAGE-A protein, nuclear and/or cytoplasmic staining was interpreted as a positive staining pattern; staining in any cancer cells, irrespective of percentage of positive cells or intensity, was regarded as positive.

[0501] Dual-labeling immunoflourescence was performed to complement immunohistochemistry as a means of two-channel identification of epitopes co-expressed in similar or overlapping sub-cellular locations. Briefly, 4-mm-thick paraffin sections were incubated with 1:100 mouse anti-MAGE antibody+1:1000 rabbit anti-HMGB1 antibody at 4° C. overnight and then incubated with 1:2000 Alexa Fluor 594-conjugated anti-mouse IgG and Alexa Fluor 488-conjugated anti-rabbit IgG (Invitrogen) at room temperature for 1 hour. The sections were cover slipped with ProLong Gold anti-fade with DAPI (Invitrogen). Sections were analyzed with a BX51/BX52 microscope (Olympus America, Melville, N.Y., USA), and images were captured using the CytoVision 3.6 software (Applied Imaging, San Jose, Calif., USA). Single label immunofluorescence was also performed using isotype-specific irrelevant primary antibodies and with switching of the secondary antibodies to ensure specificity and exclude cross reactivity.

### Survival Analysis

[0502] The association of Xq28-CGA expression with overall survival was evaluated using the Kaplan-Meier method. In the discovery cohort, patients with Xq28-CGA expression values above the median were considered “high” and below the median were considered “low.” The effect of Xq28-CGA expression on overall survival adjusting for age, gender, number of pre-therapies, M-stage, LDH and neoantigen load was assessed using the Cox proportional hazards model.

### Statistical Analysis

[0503] Differential expression and methylation analyses within TCGA samples were performed using a false discovery rate (Benjamini-Hochberg) of 0.05. Hypergeometric tests were used to evaluate overlap of differentially expressed genes between the clinical and TCGA cohorts. Multivariable survival analysis was performed using the Cox proportional hazards model (R package ‘coxph’). All statistical analyses were done using R version-3.2.5. Overlaps of gene lists with pathways in the PANTHER (Protein ANalysis THrough Evolutionary Relationships) database (containing 177 pathways) were evaluated with the overrepresentation test using the Bonferroni correction (Mi et al., 2016).

TABLE 1
Clinical characteristics of discovery and validation cohorts

| | | | | | Time to | Overall | | | |
|---|---|---|---|---|---|---|---|---|---|
| | | | | | progression | survival | | | # prior |
| | ID | Gender | Age | RECIST | (wks) | (yrs) | LDH | M class | therapies |
| Discovery Cohort | Pat02 | female | 42 | SD | 77 | 4.5 | 1 | M1c | 1 |
| (Van Allen et al): | Pat04 | male | 71 | PR | 92 | 2.7 | 0 | M1b | 7 |
| Clinical benefit (CB) | Pat29 | male | 82 | X | 49 | 3.6 | 0 | M1c | 1 |
| | Pat38 | male | 45 | PR | 43 | 4.2 | 0 | M1c | 2 |
| | Pat39 | male | 67 | CR | 212 | 4.1 | 0 | M1b | 1 |
| | Pat47 | male | 78 | CR | 158 | 3 | 0 | M1c | 1 |
| | Pat49 | male | 36 | SD | 23 | 2.8 | 0 | M1c | 0 |
| | Pat79 | male | 69 | PR | 58 | 2.2 | 0 | M1b | 1 |
| | Pat80 | male | 48 | SD | 26 | 2 | 1 | M1c | 1 |
| | Pat88 | female | 60 | SD | 95 | 2.7 | NA | M1c | 0 |
| | Pat90 | male | 59 | PR | 96 | 2.8 | 0 | M1c | 1 |
| | Pat123 | female | 50 | SD | 78 | 2.3 | 1 | M1c | 5 |
| | Pat126 | male | 77 | PR | 27 | 1.8 | 1 | M1b | 1 |
| Discovery Cohort | Pat03 | female | 61 | PD | 11 | 0.3 | 1 | M1c | 3 |
| (Van Allen et al): | Pat06 | male | 33 | PD | 11 | 0.4 | 0 | M1c | 4 |
| No benefit (NB) | Pat08 | male | 73 | PD | 10 | 0.4 | 0 | M1c | 2 |
| | Pat118 | female | 48 | PD | 12 | 0.4 | 0 | M1c | 3 |
| | Pat14 | male | 32 | PD | 4 | 0.1 | 1 | M1c | 4 |
| | Pat15 | male | 59 | PD | 3 | 0.5 | 0 | M1c | 0 |
| | Pat19 | male | 78 | PD | 10 | 0.3 | 0 | M1c | 1 |
| | Pat25 | male | 69 | PD | 10 | 0.9 | 1 | M1c | 1 |
| | Pat33 | male | 65 | PD | 30 | 0.6 | 1 | M1c | 3 |
| | Pat36 | female | 52 | PD | 6 | 0.1 | 1 | M1c | 3 |
| | Pat37 | female | 47 | PD | 3 | 0.2 | 1 | M1c | 1 |
| | Pat40 | male | 74 | PD | 5 | 0.1 | 1 | M1c | 3 |
| | Pat41 | male | 64 | PD | 8 | 0.4 | 1 | M1c | 1 |
| | Pat43 | female | 75 | PD | 5 | 0.1 | 1 | M1b | 2 |
| | Pat44 | female | 57 | PD | 9 | 0.7 | 1 | M1c | 1 |
| | Pat45 | male | 68 | PD | 9 | 0.2 | 1 | M1c | 1 |
| | Pat46 | female | 36 | PD | 5 | 0.4 | 0 | M1b | 1 |
| | Pat50 | male | 77 | PD | 9 | 0.2 | 0 | M1c | 0 |
| | Pat81 | female | 54 | PD | 11 | 1.7 | 0 | M1a | 0 |
| | Pat85 | male | 83 | PD | 12 | 1.3 | 0 | M1c | 1 |
| | Pat86 | male | 55 | SD | 22 | 0.8 | 0 | M1a | 0 |
| | Pat98 | female | 57 | PD | 11 | 0.4 | 0 | M1c | 0 |
| Discovery Cohort | Pat119 | female | 68 | PD | 12 | 2.2 | 0 | M1b | 1 |
| (Van Allen et al): | pat16 | male | 61 | PD | 20 | 3.8 | 0 | M1c | 1 |
| Long-term survival | Pat27 | male | 77 | PD | 11 | 3.2 | 1 | M1c | 2 |
| with no clinical | Pat28 | male | 22 | PD | 15 | 2.8 | 0 | M1c | 0 |
| benefit | Pat83 | male | 61 | PD | 15 | 2.2 | 1 | M0 | 1 |

| | ID | Gender | Age | RECIST |
|---|---|---|---|---|
| Validation cohort | 1 | Male | 47 | SD |
| (Weber et al)Ipilimumab | 2 | Male | 82 | PR |
| --> nivolumab: No | 3 | Male | 31 | PR |
| progressive disease | 4 | Male | 70 | SD |
| | 5 | Female | 48 | SD |
| | 6 | Male | 66 | SD |
| | 7 | Male | 66 | PR |
| | 8 | Male | 51 | SD |
| | 9 | Male | 74 | SD |
| | 10 | Male | 67 | PR |
| | 11 | Male | 54 | SD |
| | 12 | Male | 63 | SD |
| Validation cohort | 13 | Male | 84 | PD |
| (Weber et al)Ipilimumab | 14 | Male | 37 | PD |
| --> nivolumab: | 15 | Male | 46 | PD |
| Progressive disease | 16 | Female | 64 | PD |
| | 17 | Male | 73 | PD |
| | 18 | Male | 74 | PD |
| | 19 | Male | 56 | PD |
| | 20 | Male | 78 | PD |
| | 21 | Female | 62 | PD |
| | 22 | Female | 55 | PD |
| | 23 | Female | 75 | PD |
| | 24 | Female | 44 | PD |
| | 25 | Female | 63 | PD |
| | 26 | Male | 38 | PD |
| | 27 | Male | 53 | PD |
| | 28 | Male | 36 | PD |
| | 29 | Female | 35 | PD |
| | 30 | Male | 55 | PD |
| | 31 | Male | 74 | PD |
| | 32 | Female | 78 | PD |
| | 33 | Male | 79 | PD |
| | 34 | Male | 84 | PD |
| | 35 | Male | 66 | PD |
| | 36 | Female | 56 | PD |
| | 37 | Male | 64 | PD |
| | 38 | Female | 63 | PD |
| | 39 | Female | 73 | PD |
| | 40 | Male | 52 | PD |
| | 41 | Male | 75 | PD |
| Validation cohort | 34 | Male | 65 | PR |
| (Weber et al) Nivolumab | 35 | Female | 27 | PR |
| --> ipilimumab: No | 36 | Female | 42 | PR |
| progressive disease | 37 | Male | 74 | PR |
| | 38 | Male | 58 | SD |
| | 39 | Male | 57 | SD |
| | 40 | Female | 64 | PR |
| | 41 | Female | 40 | SD |
| | 42 | Male | 62 | PR |
| | 43 | Male | 63 | PR |
| | 44 | Male | 36 | SD |
| | 45 | Male | 46 | SD |
| | 46 | Male | 73 | SD |
| | 47 | Male | 57 | SD |
| | 48 | Male | 60 | PR |
| | 49 | Male | 52 | SD |
| | 50 | Female | 58 | SD |
| | 51 | Female | 47 | PR |
| | 52 | Female | 59 | PR |
| | 53 | Male | 89 | SD |
| | 54 | Male | 72 | PR |
| | 55 | Male | 56 | PR |
| | 56 | Male | 81 | PR |
| Validation cohort | 57 | Male | 62 | PD |
| (Weber et al)Nivolumab | 58 | Female | 62 | PD |
| --> ipilimumab: | 59 | Female | 72 | PD |
| Progressive disease | 60 | Male | 73 | PD |
| | 61 | Female | 49 | PD |
| | 62 | Male | 40 | PD |
| | 63 | Male | 71 | PD |
| | 64 | Female | 32 | PD |
| | 65 | Male | 36 | PD |
| | 66 | Male | 60 | PD |
| | 67 | Male | 70 | PD |
| | 68 | Male | 30 | PD |
| | 69 | Male | 52 | PD |
| | 70 | Male | 77 | PD |

TABLE 2
Genes enriched in No Benefit and Clinical Benefit group

| Gene | Gene Nome | Fold Change | P-value | Group |
|---|---|---|---|---|
| MAGEA2 | melanoma antigen family A, 2 | 194.87 | 0.001681771 | NB |
| AC093787.1 | | 191.37 | 0.014074651 | NB |
| KRT8P8 | keratin 8 pseudogene 8 | 115.36 | 0.000437919 | NB |
| CSAG4 | CSAG family, member 4 (pseudogene) | 113.21 | 0.001374253 | NB |
| GABRA3 | gamma-aminobutyric add (GABA) A receptor, alpha 3 | 110.18 | 0.00105356 | NB |
| MAGEA2B | melanoma antigen family A, 2B | 102.86 | 0.001902564 | NB |
| CSAG2 | CSAG family, member 2 | 95.83 | 0.000939032 | NB |
| MKRN9P | makorin ring finger protein 9, pseudogene | 93.52 | 0.001122703 | NB |
| MAGEA6 | melanoma antigen family A, 6 | 87.63 | 0.005477973 | NB |
| CSAG3 | CSAG family, member 3 | 87.39 | 0.001254778 | NB |
| RP1-273G13.1 | | 84.57 | 0.001749305 | NB |
| EYA1 | eyes absent homolog 1 (Drosophila) | 79.9 | 0.003059735 | NB |
| MIR218-1 | microRNA 218-1 | 77.65 | 0.004961686 | NB |
| CSAG1 | chondrosarcoma associated gene 1 | 73.33 | 0.008425839 | NB |
| RP11-379D21.3 | | 67.64 | 0.003911124 | NB |
| MAGEA12 | melanoma antigen family A, 12 | 67.35 | 0.013100955 | NB |
| MAGEA3 | melanoma antigen family A, 3 | 58.31 | 0.008391308 | NB |
| RP11-360D2.1 | | 55.78 | 0.004483201 | NB |
| MIR1262 | micraRNA 1262 | 48.86 | 0.004516422 | NB |
| PSG6 | pregnancy specific beta-1-glycoprotein 6 | 47.93 | 0.009417526 | NB |
| PSG11 | pregnancy specific beta-1-glycoprotein 11 | 42.47 | 0.001216848 | NB |
| RP1-13D10.2 | | 40.78 | 0.002072617 | NB |
| OR11H12 | olfactory receptor, family 11, subfamily H, member 12 | 39.49 | 0.004790916 | NB |
| MAGEC1 | melanoma antigen family C, 1 | 37.21 | 0.024814077 | NB |
| CTD-2302A16.2 | | 36.28 | 0.038385003 | NB |
| CTD-2201G16.1 | | 36.19 | 0.025889607 | NB |
| RP11-526L8.1 | | 34.16 | 0.026158447 | NB |
| RP11-804F13.2 | | 34.02 | 0.001073914 | NB |
| PSG8 | pregnancy specific beta-1-glycoprotein 8 | 31.38 | 0.02875596 | NB |
| SOX5P | SRY (sex determining region Y)-box 5 pseudogene | 27.52 | 0.010553127 | NB |
| AC097635.5 | | 27.14 | 0.013029879 | NB |
| SLC25A15P4 | solute carrier family 25 (mitochondrial carrier; ornithin [symbol] | 26.67 | 0.033214335 | NB |
| RP11-533K9.3 | | 25.7 | 0.025889607 | NB |
| NFYAP1 | nuclear transcription factor Y, alpha pseudogene 1 | 25.61 | 0.007926133 | NB |
| GJB6 | gap junction protein, beta 6, 30 kDa | 25.6 | 0.002430921 | NB |
| GABRQ | gamma-aminobutyric acid (GABA) A receptor, theta | 25.08 | 0.000665219 | NB |
| XIST | X inactive specific transcript (non-protein coding) | 24.53 | 0.015742933 | NB |
| TNP1 | transition protein 1 (during histone to protamine repla [symbol] | 23.74 | 0.030404894 | NB |
| AC135995.2 | | 23.56 | 0.015640563 | NB |
| SNORA27 | small nucleolar RNA, H/ACA box 27 | 22.87 | 0.014772695 | NB |
| SERPINA5 | serpin peptidase inhibitor, clade A (alpha-1 antiprotein [symbol] | 22.55 | 0.001957165 | NB |
| RP11-250B2.2 | | 21.76 | 0.003178944 | NB |
| CTC-329D1.2 | | 21.66 | 0.010553127 | NB |
| MAGEA1 | melanoma antigen family A, 1 (directs expression of an [symbol] | 21.42 | 0.016995145 | NB |
| RP11-379D21.2 | | 20.89 | 0.001703467 | NB |
| OR2M3 | olfactory receptor, family 2, subfamily M, member 3 | 20.48 | 0.00982579 | NB |
| AGMO | alkylglycerol monooxygenase | 20.21 | 0.001148356 | NB |
| RP11-728C8.1 | | 20.06 | 0.008215814 | NB |
| CYP26A1 | cytochrome P450, family 26, subfamily A, polypeptide [symbol] | 19.61 | 0.008358255 | NB |
| RP11-685G9.2 | | 19.57 | 0.003476545 | NB |
| RP1-221C16.7 | | 19.51 | 0.012379028 | NB |
| ENSAP1 | endosulfine alpha pseudogene 1 | 19.32 | 0.042437855 | NB |
| PSG5 | pregnancy specific beta-1-glycoprotein 5 | 19.2 | 0.009622364 | NB |
| AC007312.3 | | 19.11 | 0.038857039 | NB |
| LA16c-4G1.5 | | 19.11 | 0.004269868 | NB |
| RP11-114H24.7 | | 19.09 | 0.039174691 | NB |
| PSG2 | pregnancy specific beta-1-glycoprotein 2 | 19.08 | 0.014252125 | NB |
| AC126339.2 | | 18.9 | 0.044112433 | NB |
| RP4-535B20.1 | | 18.85 | 0.049098599 | NB |
| RP11-290F24.3 | | 18.84 | 0.002622662 | NB |
| PPM1AP1 | protein phosphatase, Mg2+/Mn2+dependent 1A, pseu [symbol] | 18.79 | 0.020779381 | NB |
| HMGN1P17 | high mobility group nucleosome binding domain 1 pse [symbol] | 18.67 | 0.023187328 | NB |
| PSG10P | pregnancy specific beta-1-glycoprotein 10, pseudogene | 18.44 | 0.011708098 | NB |
| OR7E156P | olfactory receptor, family 7, subfamily E, member 156 [symbol] | 18.38 | 0.023557449 | NB |
| RP4-610C12.3 | | 18.33 | 0.004753871 | NB |
| FPGT-TNNI3K | FPGT-TNNI3K readthrough | 18.05 | 0.008875911 | NB |
| RP4-710M3.1 | | 17.9 | 0.030948543 | NB |
| AC010724.2 | | 17.64 | 0.038448428 | NB |
| RP11-17A1.2 | | 17.54 | 0.002310348 | NB |
| VENTXP5 | VENT homeobox pseudogene 5 | 17.49 | 0.000887029 | NB |
| CFHR4 | complement factor H-related 4 | 17.16 | 0.00659527 | NB |
| CCDC42 | coiled-coil domain containing 42 | 16.99 | 0.01123551 | NB |
| RP1-232L24.2 | | 16.31 | 0.024728355 | NB |
| IL13RA2 | interleukin 13 receptor, alpha 2 | 16.3 | 0.031216315 | NB |
| OR11H12 | olfactory receptor, family 11, subfamiy H, member 12 | 16.28 | 0.000660549 | NB |
| RP11-9H16.1 | | 16.25 | 0.021446576 | NB |
| RP11-670N15.2 | | 16.22 | 0.032630531 | NB |
| RP11-326E22.1 | | 16.08 | 0.006136197 | NB |
| ASS1P9 | argininosuccinate synthetase 1 pseudogene 9 | 15.74 | 0.009002927 | NB |
| RP11-310H4.5 | | 15.28 | 0.00216299 | NB |
| NXT1P1 | NTF2-like export factor 1 pseudogene 1 | 15.26 | 0.042179156 | NB |
| HMGN2P25 | high mobility group nucleosomal binding domain 2 pse [symbol] | 15 | 0.045821322 | NB |
| MAGEC2 | melanoma antigen family C, 2 | 14.91 | 0.024662434 | NB |
| RPS12P21 | ribosomal protein S12 pseudogene 21 | 14.9 | 0.038857039 | NB |
| HSPB3 | heat shock 27 kDa protein 3 | 14.68 | 0.011561372 | NB |
| HOXD11 | homeobox D11 | 14.62 | 0.002516383 | NB |
| ANKRD7 | ankyrin repeat domain 7 | 14.38 | 0.007839036 | NB |
| PSG1 | pregnancy specific beta-1-glycoprotein 1 | 14.26 | 0.014251282 | NB |
| GDNF | glial cell derived neurotrophic factor | 14.13 | 0.00731008 | NB |
| RP3-406A7.5 | | 14.13 | 0.047995343 | NB |
| PSG7 | pregnancy specific beta-1-glycoprotein 7 (gene/pseudo [symbol] | 14.09 | 0.025544289 | NB |
| RP3-432I18.1 | | 13.99 | 0.042179156 | NB |
| GAGE12D | G antigen 12D | 13.96 | 0.020177433 | NB |
| RPL7P56 | ribosomal protein L7 pseudogene 56 | 13.44 | 0.006122033 | NB |
| GTF2A1L | general transcription factor IIA, 1-like | 13.36 | 0.039174691 | NB |
| FBP2 | fructose-1,6-bisphosphatase 2 | 13.18 | 0.040365068 | NB |
| ACTBP8 | actin, beta pseudogene 8 | 13.05 | 0.006307706 | NB |
| MAGEA11 | melanoma antigen family A, 11 | 13.03 | 0.018744092 | NB |
| RSL24D1P2 | ribosomal L24 domain containing 1 pseudogene 2 | 13 | 0.035978626 | NB |
| OR2H5P | olfactory receptor, family 2, subfamily H, member 5 ps [symbol] | 12.88 | 0.029540253 | NB |
| AC002076.9 | | 12.77 | 0.024189646 | NB |
| C1QTNF9-AS1 | C1QTNF9 antisense RNA 1 | 12.72 | 0.011759771 | NB |
| OR52N2 | olfactory receptor, family 52, subfamily N, member 2 | 12.7 | 0.010901498 | NB |
| RP11-973N13.3 | | 12.53 | 0.002704784 | NB |
| ANKRD45 | ankyrin repeat domain 45 | 12.49 | 0.008813638 | NB |
| OR2T12 | olfactory receptor, family 2, subfamily T, member 12 | 12.45 | 0.048632504 | NB |
| PSG4 | pregnancy specific beta-1-glycoprotein 4 | 12.22 | 0.003256582 | NB |
| SPANXB2 | SPANX family, member B1 | 12.08 | 0.015009075 | NB |
| CTD-2206G10.1 | | 11.79 | 0.020435079 | NB |
| CHL1-AS2 | CHL1 antisense RNA 2 | 11.76 | 0.008620126 | NB |
| RP11-316E14.2 | | 11.63 | 0.042283368 | NB |
| PLAC1 | placenta-specific 1 | 11.62 | 0.032391329 | NB |
| MRPS17P9 | mitochondrial ribosomal protein S17 pseudogene 9 | 11.55 | 0.042179156 | NB |
| RP11-290F24.4 | | 7.84 | 0.025644286 | NB |
| AL359392.1 | | 7.83 | 0.047209651 | NB |
| BAI3 | | 7.82 | 0.008070194 | NB |
| ZEB2P1 | zinc finger E-box binding homeobox 2 pseudogene 1 | 7.78 | 0.010062094 | NB |
| CDK2AP2P1 | cycin-dependent kinase 2 associated protein 2 pseudo [symbol] | 7.74 | 0.048733769 | NB |
| AC105461.1 | | 7.72 | 0.049369302 | NB |
| RP11-138J23.1 | | 7.7 | 0.034551581 | NB |
| RP11-132G10.2 | | 7.68 | 0.034369721 | NB |
| SLC9C2 | solute carrier family 9, member C2 (putative) | 7.59 | 0.001888785 | NB |
| NELL1 | NEL-like 1 (chicken) | 7.59 | 0.028688235 | NB |
| RPS18P1 | ribosomal protein S18 pseudogene 1 | 7.59 | 0.04941826 | NB |
| RP11-1007G5.2 | | 7.49 | 0.041920281 | NB |
| OR9A3P | olfactory receptor, family 9, subfamily A, member 3 ps [symbol] | 7.42 | 0.0131522 | NB |
| SLCO1A2 | solute carrier organic anion transporter family, membe [symbol] | 7.28 | 0.038479039 | NB |
| GRIA2 | glutamate receptor, ionotropic, AMPA 2 | 7.27 | 0.029382731 | NB |
| METTL11B | methyltransferase like 11B | 7.19 | 0.042437855 | NB |
| MYLKP1 | myosin light chain kinase pseudogene 1 | 7.19 | 0.041397125 | NB |
| LINC00189 | long intergenic non-protein coding RNA 189 | 7.1 | 0.035553997 | NB |
| RP11-384F7.2 | | 7.07 | 0.017952081 | NB |
| MAGEA9B | melanoma antigen family A, 9B | 7.06 | 0.014094423 | NB |
| SRGAP3-AS1 | SRGAP3 antisense RNA 1 | 7.05 | 0.046077602 | NB |
| PSG9 | pregnancy specific beta-1-glycoprotein 9 | 7.05 | 0.030297821 | NB |
| RP11-959F10.4 | | 7.04 | 0.001238714 | NB |
| OR52E8 | olfactory receptor, family 52, subfamily E, member 8 | 6.97 | 0.042179156 | NB |
| RP11-1365D11.1 | | 6.93 | 0.041659897 | NB |
| AC018682.6 | | 6.92 | 0.018687432 | NB |
| HNRNPCL1 | heterogeneous nuclear ribonucleoprotein C-like 1 | 6.89 | 0.002516383 | NB |
| NLRP4 | NLR family, pyrin domain containing 4 | 6.84 | 0.010808151 | NB |
| LGALS12 | lectin, galactoside-binding, soluble, 12 | 6.78 | 0.037825665 | NB |
| DCAF4L2 | DDB1 and CUL4 associated factor 4-like 2 | 6.74 | 0.032737245 | NB |
| OR5K1 | olfactory receptor, family 5, subfamily K, member 1 | 6.67 | 0.007926133 | NB |
| AC079753.5 | | 6.63 | 0.048733769 | NB |
| TPTE2P6 | transmembrane phosphoinositide 3-phosphatase and t [symbol] | 6.62 | 0.003242319 | NB |
| LGI4 | leucine-rich repeat LGI family, member 4 | 6.57 | 0.005926234 | NB |
| KANK4 | KN motif and ankyrin repeat domains 4 | 6.55 | 0.041739925 | NB |
| TDPX2 | | 6.49 | 0.01692508 | NB |
| FPGT-TNNI3K | FPGT-TNNI3K readthrough | 6.48 | 0.001351513 | NB |
| RP11-206P5.2 | | 6.46 | 0.036254638 | NB |
| PI15 | peptidase inhibitor 15 | 6.46 | 0.011925792 | NB |
| LGI1 | leucine-rich, glioma inactivated 1 | 6.45 | 0.021949515 | NB |
| OPRD1 | opioid receptor, delta 1 | 6.42 | 0.044163971 | NB |
| TAAR6 | trace amine associated receptor 6 | 6.42 | 0.006632488 | NB |
| ISL2 | ISL LIM homeobox 2 | 6.42 | 0.009764943 | NB |
| OR7E91P | olfactory receptor, family 7, subfamily E, member 91 ps [symbol] | 6.41 | 0.036277389 | NB |
| ANKFN1 | ankyrin-repeat and fibronectin type III domain containi [symbol] | 6.41 | 0.006344984 | NB |
| UROC1 | urocanate hydratase 1 | 6.38 | 0.011561372 | NB |
| IGFN1 | immunoglobulin-like and fibronectin type III domain co [symbol] | 6.36 | 0.042370292 | NB |
| PRL | prolactin | 6.3 | 0.03495366 | NB |
| FRAS1 | Fraser syndrome 1 | 6.22 | 0.000149689 | NB |
| FSCN1 | fascin actin-bundling protein 1 | 6.21 | 0.000438786 | NB |
| FEM1AP4 | fem-1 homolog a (C. elegans) pseudogene 4 | 6.21 | 0.007806012 | NB |
| TERF1P1 | telomeric repeat binding factor (NIMA-interacting) 1 ps [symbol] | 6.21 | 0.043875977 | NB |
| RP11-54D18.2 | | 6.2 | 0.023106635 | NB |
| PCDHB3 | protocadherin beta 3 | 6.12 | 0.002421425 | NB |
| TOB2P1 | transducer of ERBB2, 2 pseudogene 1 | 6.06 | 0.024375591 | NB |
| OTOGL | otogelin-like | 6.06 | 0.018812935 | NB |
| C1orf185 | | 6.05 | 0.012843104 | NB |
| SYTL5 | synaptotagmin-like 5 | 11.47 | 0.014391143 | NB |
| RPS2P39 | ribosomal protein S2 pseudogene 39 | 11.44 | 0.025105736 | NB |
| CEACAMP5 | carcinoembryonic antigen-related cell adhesion molec [symbol] | 11.43 | 0.005369816 | NB |
| TFF2 | trefoil factor 2 | 11.43 | 0.008928345 | NB |
| AC016737.1 | | 11.35 | 0.007926133 | NB |
| RP11-438N16.2 | | 11.34 | 0.016120921 | NB |
| RP11-634B7.5 | | 11.31 | 0.038385003 | NB |
| RP11-108F13.2 | | 11.3 | 0.00239315 | NB |
| RP11-386I14.3 | | 11.25 | 0.015009075 | NB |
| RP11-885B4.1 | | 11.24 | 0.019586567 | NB |
| GRIN2B | glutamate receptor, ionotropic, N-methylD-aspartate [symbol] | 11.08 | 0.000583885 | NB |
| RPSAP43 | ribosomal protein SA pseudogene 43 | 11.05 | 0.04941826 | NB |
| OR2M2 | olfactory receptor, family 2, subfamily M, member 2 | 11.04 | 0.017682347 | NB |
| RP11-69I13.1 | | 10.87 | 0.011874924 | NB |
| RPS20P24 | ribosomal protein S20 pseudogene 24 | 10.66 | 0.025280278 | NB |
| CASP12 | caspase 12 (gene/pseudogene) | 10.62 | 0.00105356 | NB |
| AKAP6 | A kinase (PRKA) anchor protein 6 | 10.55 | 0.004785714 | NB |
| RP11-294J22.6 | | 10.54 | 0.049758592 | NB |
| RP1-273G13.2 | | 10.4 | 0.001483816 | NB |
| RP11-115C10.1 | | 10.28 | 0.014679168 | NB |
| OR2J3 | olfactory receptor, family 2, subfamily J, member 3 | 10.2 | 0.04941826 | NB |
| OR11H1 | olfactory receptor, family 11, subfamily H, member 1 | 10.15 | 0.014094423 | NB |
| OBP2A | odorant binding protein 2A | 10.14 | 0.038385003 | NB |
| GAGE13 | G antigen 13 | 10.07 | 0.048733769 | NB |
| SPINK13 | serine peptidase inhibitor, Kazal type 13 (putative) | 10 | 0.000900029 | NB |
| RP11-972K6.1 | | 10 | 0.046077602 | NB |
| KRT18P29 | keratin 18 pseudogene 29 | 9.86 | 0.001205418 | NB |
| RAET1L | retinoic acid early transcript 1L | 9.74 | 0.028546721 | NB |
| MYH1 | myosin, heavy chain 1, skeletal muscle, adult | 9.7 | 0.001681771 | NB |
| RP11-36B15.1 | | 9.49 | 0.047995343 | NB |
| RP11-889L3.4 | | 9.46 | 0.025105736 | NB |
| GLRA4 | glycine receptor, alpha 4 | 9.39 | 0.00250769 | NB |
| RP11-7G23.5 | | 9.37 | 0.041659897 | NB |
| AC008537.1 | | 9.36 | 0.00140516 | NB |
| AP002380.1 | | 9.3 | 0.009891102 | NB |
| RP3-461F17.2 | | 9.26 | 0.04756409 | NB |
| CR848007.6 | | 9.19 | 0.036211389 | NB |
| MYLK-AS1 | MYLK antisense RNA 1 | 9.17 | 0.029945212 | NB |
| MAGEB2 | melanoma antigen family B, 2 | 9.09 | 0.015914763 | NB |
| CFL1P2 | cofilin 1 (non-muscle) pseudogene 2 | 9.04 | 0.010626103 | NB |
| AC007557.1 | | 9.03 | 0.011581165 | NB |
| OR1D4 | olfactory receptor, family 1, subfamily D, member 4 (ge [symbol] | 8.93 | 0.017845056 | NB |
| MAGEC3 | melanoma antigen family C, 3 | 8.81 | 0.001071925 | NB |
| AC087491.2 | | 8.73 | 0.049369302 | NB |
| TTLL10-AS1 | TTLL10 antisense RNA 1 | 8.6 | 0.038385003 | NB |
| RP11-416N13.1 | | 8.46 | 0.04756409 | NB |
| AADAC | arylacetamide deacetylase | 8.36 | 0.028010999 | NB |
| RPL27AP8 | ribosomal protein L27a pseudogene 8 | 8.28 | 0.003936897 | NB |
| OR2M5 | olfactory receptor, family 2, subfamily M, member 5 | 8.21 | 0.019371037 | NB |
| FAM3D | family with sequence similarity 3, member D | 8.17 | 0.043875977 | NB |
| SLCO1B1 | solute carrier organic anion transporter family, membe [symbol] | 8.15 | 0.045588672 | NB |
| AC093110.3 | | 8.09 | 0.006633885 | NB |
| FUCA1P1 | fucosidase, alpha-L-1, tissue pseudogene 1 | 8.05 | 0.004515513 | NB |
| MAGEA8 | melanoma antigen family A, 8 | 8.05 | 0.029382731 | NB |
| RP11-557F20.2 | | 8 | 0.029762656 | NB |
| CIB4 | calcium and integrin binding family member 4 | 7.96 | 0.013029879 | NB |
| SFRP1 | secreted frizzled-related protein 1 | 7.93 | 0.018812935 | NB |
| RP11-315I20.3 | | 6.02 | 0.022360081 | NB |
| TRIM71 | tripartite motif containing 71, E3 ubiquitin protein ligas [symbol] | 5.97 | 0.045176166 | NB |
| CRB1 | crumbs family member 1, photoreceptor morphogenes [symbol] | 5.95 | 0.004290131 | NB |
| HPSE2 | heparanase 2 | 5.92 | 0.031391184 | NB |
| FSHR | follide stimulating hormone receptor | 5.86 | 0.020177433 | NB |
| RND2 | Rho family GTPase 2 | 5.86 | 0.003059735 | NB |
| VSX1 | visual system homeobox 1 | 5.86 | 0.003695654 | NB |
| GJB2 | gap junction protein, beta 2, 26 kDa | 5.85 | 0.001681771 | NB |
| LEFTY2 | left-right determination factor 2 | 5.8 | 0.030404894 | NB |
| PPP1R1C | protein phosphatase 1, regulatory (inhibitor) subunit 1 [symbol] | 5.8 | 0.000704181 | NB |
| ELOVL2 | ELOVL fatty acid elongase 2 | 5.74 | 0.02643572 | NB |
| AC107983.2 | | 5.71 | 0.008917729 | NB |
| RP13-210D15.1 | | 5.71 | 0.042179156 | NB |
| MPZ | myelin protein zero | 5.67 | 0.033656613 | NB |
| DNM3OS | DNM3 opposite strand/antisense RNA | 5.66 | 0.028426013 | NB |
| KLHL13 | kelch-like family member 13 | 5.65 | 0.031092971 | NB |
| HHATL | hedgehog acyltransferase-like | 5.64 | 0.0186415 | NB |
| RP11-351M16.1 | | 5.63 | 0.046077602 | NB |
| HCN1 | hyperpolarization activated cyclic nucleotide-gated pot [symbol] | 5.61 | 0.021040385 | NB |
| CEACAMP1 | carcinoembryonic antigen-related cell adhesion molec [symbol] | 5.61 | 0.036277389 | NB |
| RP11-536C10.24 | | 5.59 | 0.006136197 | NB |
| CITED4 | Cbp/p300-interacting transactivator, with Glu/Asp-rich | 5.58 | 0.007203049 | NB |
| AMDP1 | | 5.55 | 0.045085282 | NB |
| RP13-547K6.1 | | 5.53 | 0.010808151 | NB |
| C5orf27 | | 5.49 | 0.033515231 | NB |
| SLC22A10 | solute carrier family 22, member 10 | 5.42 | 0.008187016 | NB |
| TSPEAR | thrombospondin-type laminin G domain and EAR repea [symbol] | 5.42 | 0.007254752 | NB |
| U82695.9 | | 5.42 | 0.001227747 | NB |
| KIAA0087 | KIAA0087 | 5.4 | 0.000569695 | NB |
| MOCS1P1 | molybdenum cofactor synthesis 1 pseudogene 1 | 5.37 | 0.012166712 | NB |
| MYH2 | myosin, heavy chain 2, skeletal muscle, adult | 5.37 | 0.005926234 | NB |
| RP11-959F10.5 | | 5.36 | 0.00328693 | NB |
| SERPINA4 | serpin peptidase inhibitor, clade A (alpha-1 antiprotein [symbol] | 5.3 | 0.006480309 | NB |
| TPD52L1 | tumor protein D52-like 1 | 5.28 | 0.028688235 | NB |
| SLC30A8 | solute carrier family 30 (zinc transporter), member 8 | 5.27 | 0.034885381 | NB |
| RGS6 | regulator of G-protein signaling 6 | 5.25 | 0.016310813 | NB |
| DLX6-AS2 | DLX6 antisense RNA 2 | 5.24 | 0.045588672 | NB |
| C9orf153 | | 5.24 | 0.009764943 | NB |
| MYH13 | myosin, heavy chain 13, sleletal muscle | 5.24 | 0.002724323 | NB |
| CA10 | carbonic anhydrase X | 5.24 | 0.006122033 | NB |
| DGKB | diacylglycerol kinase, beta 90 kDa | 5.23 | 0.012651023 | NB |
| GABRB1 | gamma-aminobutyric acid (GABA) A receptor, beta 1 | 5.22 | 0.020435079 | NB |
| AC013268.3 | | 5.2 | 0.009041786 | NB |
| RP11-696L21.1 | | 5.18 | 0.026859197 | NB |
| RP11-450I19.2 | | 5.15 | 0.010626103 | NB |
| TRIM9 | tripartite motif containing 9 | 5.12 | 0.022360081 | NB |
| GFRA3 | GDNIF family receptor alpha 3 | 5.11 | 0.015027152 | NB |
| XIRP2 | xin actin-binding repeat containing 2 | 5.1 | 0.009662367 | NB |
| RHO | rhodopsin | 5.1 | 0.029762656 | NB |
| CLDN1 | claudin 1 | 5.09 | 0.022360081 | NB |
| IRGC | immunity-related GTPase family, cinema | 5.09 | 0.016120921 | NB |
| PCK1 | phosphoenolpyruvate carboxykinase 1 (soluble) | 5.04 | 0.023851247 | NB |
| MAPK10 | mitogen-activated protein kinase 10 | 5.03 | 0.024328524 | NB |
| EPHA6 | EPH receptor A6 | 5.02 | 0.010347516 | NB |
| NXF2B | nuclear RNA export factor 2B | 5.02 | 0.026302018 | NB |
| HMGA2 | high mobility group AT-hook 2 | 5 | 0.045638568 | NB |
| KLK13 | kallikrein-related peptidase 13 | 5 | 0.010808151 | NB |
| RP1-14D6.2 | | 5 | 0.014679168 | NB |
| C21orf90 | | 4.93 | 0.008608265 | NB |
| RP11-678B3.1 | | 4.91 | 0.007605535 | NB |
| CHRNA1 | cholinergic receptor, nicotinic, alpha 1 (muscle) | 4.9 | 0.02052367 | NB |
| RP11-501I19.4 | | 4.88 | 0.027988697 | NB |
| GABRR1 | gamma-aminobutyric acid (GABA) A receptor, rho 1 | 4.88 | 0.003640543 | NB |
| DKK3 | dickkopf WNT signaling pathway inhibitor 3 | 4.87 | 0.003059735 | NB |
| RP11-1236K1.8 | | 4.86 | 0.00729215 | NB |
| CHRNA9 | cholinergic receptor, nicotinic, alpha 9 (neuronal) | 4.82 | 0.045821322 | NB |
| TSPEAR-AS1 | TSPEAR antisense RNA 1 | 4.82 | 0.022558878 | NB |
| NBEAP3 | neurobeachin pseudogene 3 | 4.81 | 0.003673452 | NB |
| AC093162.3 | | 4.79 | 0.023511088 | NB |
| LRRC37A11P | leucine rich repeat containing 37, member A11, pseud [symbol] | 4.77 | 0.002176072 | NB |
| RP11-318M2.2 | | 4.76 | 0.004790916 | NB |
| RP11-760D2.10 | | 4.75 | 0.025811031 | NB |
| MGP | matrix Gla protein | 4.73 | 0.008917729 | NB |
| MYH8 | myosin, heavy chain 8, skeletal muscle, perinatal | 4.73 | 0.004290131 | NB |
| RFPL4B | ret finger protein-like 4B | 4.7 | 0.020204306 | NB |
| CTD-2314B22.2 | | 4.69 | 0.008917729 | NB |
| RP11-439H8.4 | | 4.67 | 0.010924889 | NB |
| RP11-72K17.1 | | 4.66 | 0.014141242 | NB |
| MYO5B | myosin VB | 4.66 | 0.031092971 | NB |
| CAPN9 | calpain 9 | 4.63 | 0.013235921 | NB |
| OR51B6 | olfactory receptor, family 51, subfamily B, member 6 | 4.63 | 0.007839036 | NB |
| PRIMA1 | proline rich membrane anchor 1 | 4.63 | 0.006390779 | NB |
| DNAJC12 | DnaJ (Hsp40) homolog, subfamily C, member 12 | 4.62 | 0.005329798 | NB |
| LRRC14B | leucine rich repeat containing 14B | 4.61 | 0.047474072 | NB |
| AGR2 | anterior gradient 2 | 4.59 | 0.032737245 | NB |
| EGF | epidermal growth factor | 4.58 | 0.013100955 | NB |
| KRT8P19 | keratin 8 pseudogene 19 | 4.57 | 0.015640563 | NB |
| FLRT3 | fibronectin leucine rich transmembrane protein 3 | 4.55 | 0.00657893 | NB |
| AC005009.2 | | 4.53 | 0.017521647 | NB |
| MYH7 | myosin, heavy chain 7, cardiac muscle, beta | 4.53 | 0.016408594 | NB |
| RP11-106M7.4 | | 4.5 | 0.003500427 | NB |
| NDP | Norrie disease (pseudoglioma) | 4.5 | 0.029382731 | NB |
| LINC00086 | | 4.48 | 0.016398129 | NB |
| SV2A | synaptic vesicle glycoprotein 2A | 4.47 | 0.024328524 | NB |
| TEKT4 | tektin 4 | 4.46 | 0.004092549 | NB |
| STRA8 | stimulated by retinoic acid 8 | 4.44 | 0.015103445 | NB |
| KCNIP1 | Kv channel interacting protein 1 | 4.43 | 0.018812935 | NB |
| RP11-373N22.4 | | 4.41 | 0.025869773 | NB |
| SERPINA3 | serpin peptidase inhibitor, clade A (alpha-1 anti protein [symbol] | 4.41 | 0.042370292 | NB |
| HMGB3P2 | high mobility group box 3 pseudogene 2 | 4.41 | 0.01102242 | NB |
| MEGF10 | multiple EGF-like-domains 10 | 4.4 | 0.005329798 | NB |
| RP11-342H21.2 | | 4.39 | 0.047474072 | NB |
| C1QTNF3 | C1q and tumor necrosis factor related protein 3 | 4.38 | 0.001483816 | NB |
| SYNDIG1L | synapse differentiation inducing 1-like | 4.36 | 0.020204306 | NB |
| USP17L2 | ubiquitin specific peptidase 17-like family member 2 | 4.35 | 0.039288394 | NB |
| RP11-81K13.1 | | 4.35 | 0.019520722 | NB |
| RP11-187E13.2 | | 4.35 | 0.036367629 | NB |
| C12orf56 | | 4.33 | 0.02678915 | NB |
| HNF4A | hepatocyte nuclear factor 4, alpha | 4.32 | 0.023187328 | NB |
| XXbac-B33L19.3 | | 4.32 | 0.028569961 | NB |
| IGLON5 | IgLON family member 5 | 4.3 | 0.028071732 | NB |
| HTR3B | 5-hyd roxytrypta mine (serotonin) receptor 3B, ionotrop [symbol] | 4.29 | 0.049216823 | NB |
| RP11-146E13.2 | | 4.28 | 0.002988917 | NB |
| RP11-160H12.3 | | 4.27 | 0.019371037 | NB |
| TMPRSS11F | transmembrane protease, serine 11F | 4.26 | 0.016219299 | NB |
| IGFBP2 | insulin-like growth factor binding protein 2, 36 kDa | 4.25 | 0.001148356 | NB |
| MIR584 | microRNA 584 | 4.25 | 0.033545013 | NB |
| GPR158 | G protein-coupled receptor 158 | 4.24 | 0.017221389 | NB |
| ZNF334 | zinc finger protein 334 | 4.24 | 0.049100171 | NB |
| Y_RNA | | 4.23 | 0.026859197 | NB |
| FREM1 | FRAS1 related extracellular matrix 1 | 4.22 | 0.014371388 | NB |
| CNDP1 | carnosine dipeptidase 1 (metallopeptidase M20 family) | 4.21 | 0.045638568 | NB |
| NR1H4 | nuclear receptor subfamily 1, group H, member 4 | 4.2 | 0.014367798 | NB |
| CXorf49 | | 4.2 | 0.04941826 | NB |
| MRGPRX3 | MAS-related GPR, member X3 | 4.18 | 0.007254752 | NB |
| SLC22A24 | solute carrier family 22, member 24 | 4.18 | 0.032272104 | NB |
| RBPJP5 | RBPJ pseudogene 5 | 4.15 | 0.042283368 | NB |
| SSX6 | synovial sarcoma, X breakpoint 6 (pseudogene) | 4.13 | 0.004509166 | NB |
| PNMAL1 | paraneoplastic Ma antigen famiy-like 1 | 4.12 | 0.003839527 | NB |
| CTB-35F21.4 | | 4.11 | 0.043653892 | NB |
| CNN2P2 | calponin 2 pseudogene 2 | 4.09 | 0.025644286 | NB |
| SALL1 | spat-like transcription factor 1 | 4.09 | 0.049100171 | NB |
| PCSK1 | proprotein convertase subtilisin/kexin type 1 | 4.08 | 0.003059735 | NB |
| PLA2G1B | phospholipase A2, group IB (pancreas) | 4.08 | 0.028780815 | NB |
| RP3-525N14.2 | | 4.08 | 0.012492516 | NB |
| PHBP13 | prohibitin pseudogene 13 | 4.07 | 0.049633437 | NB |
| PATE1 | prostate and testis expressed 1 | 4.04 | 0.017521647 | NB |
| SORCS2 | sortilin-related VPS10 domain containing receptor 2 | 4.03 | 0.039288394 | NB |
| EPS8L3 | EPS8-like 3 | 4.02 | 0.043875977 | NB |
| SLC22A6 | solute carrier famiy 22 (organic anion transporter), me [symbol] | 4.02 | 0.029762656 | NB |
| AC009237.9 | | 4 | 0.026579731 | NB |
| CER1 | cerberus 1, DAN family BMP antagonist | 4 | 0.033575171 | NB |
| RPL17P26 | ribosomal protein L17 pseudogene 26 | 3.99 | 0.006656541 | NB |
| HOXD13 | homeobox D13 | 3.98 | 0.00657893 | NB |
| RP5-886K2.1 | | 3.96 | 0.008079629 | NB |
| CCDC75P1 | coiled-coil domain containing 75 pseudogene 1 | 3.96 | 0.049851912 | NB |
| EMILIN1 | elastin microfibril interfacer 1 | 3.95 | 0.011925792 | NB |
| SULT1C3 | sulfotransferase family, cytosolic, 1C, member 3 | 3.95 | 0.031076174 | NB |
| PNPLA1 | patatin-like phospholipase domain containing 1 | 3.95 | 0.006706195 | NB |
| RP11-803B1.1 | | 3.94 | 0.008184312 | NB |
| OTOL1 | otolin 1 | 3.94 | 0.033214335 | NB |
| USP17L7 | ubiquitin specific peptidase 17-like family member 7 | 3.93 | 0.031092971 | NB |
| CABP4 | calcium binding protein 4 | 3.93 | 0.033656613 | NB |
| RP11-93I21.1 | | 3.92 | 0.033351877 | NB |
| RP11-732A19.6 | | 3.92 | 0.003430441 | NB |
| TNMD | tenomodulin | 3.92 | 0.02857165 | NB |
| SLC35D3 | solute carrier family 35, member D3 | 3.91 | 0.001964064 | NB |
| KB-1980E6.3 | | 3.91 | 0.006947328 | NB |
| CSMD3 | CUB and Sushi multiple domains 3 | 3.89 | 0.00175507 | NB |
| RP11-138E16.2 | | 3.89 | 0.00984494 | NB |
| RP11-281O15.4 | | 3.87 | 0.019304276 | NB |
| MMP16 | matrix metallopeptidase 16 (membrane-inserted) | 3.87 | 0.010840451 | NB |
| MYOG | myogenin (myogenic factor 4) | 3.86 | 0.014445675 | NB |
| KCNK16 | potassium channel, subfamily K, member 16 | 3.86 | 0.012777747 | NB |
| GJE1 | gap junction protein, epsilon 1, 23 kDa | 3.85 | 0.030508943 | NB |
| OR51K1P | olfactory receptor, family 51, subfamily K, member 1 p [symbol] | 3.85 | 0.004668469 | NB |
| TNN | tenascin N | 3.84 | 0.002421425 | NB |
| CFI | complement factor I | 3.84 | 0.002724323 | NB |
| GRIA4 | glutamate receptor, ionotropic, AMPA 4 | 3.83 | 0.004282816 | NB |
| CTD-3049M7.1 | | 3.83 | 0.028374775 | NB |
| RP5-1022P6.6 | | 3.83 | 0.025822313 | NB |
| UBXN10 | UBX domain protein 10 | 3.82 | 0.033880884 | NB |
| SPZ1 | spermatogenic leucine zipper 1 | 3.82 | 0.019575576 | NB |
| GJD4 | gap junction protein, delta 4, 40.1 kDa | 3.82 | 0.035979007 | NB |
| ALLC | allantoicase | 3.8 | 0.029299564 | NB |
| CRP | C-reactive protein, pentraxin-related | 3.79 | 0.030546079 | NB |
| SSPO | SCO-spondin | 3.78 | 0.049100171 | NB |
| ARTN | artemin | 3.77 | 0.024375591 | NB |
| RP11-15J10.3 | | 3.77 | 0.045296878 | NB |
| THSD4 | thrombospondin, type I, domain containing 4 | 3.77 | 0.017221389 | NB |
| TRPM3 | transient receptor potential cation channel, subfamily [symbol] | 3.76 | 0.036386177 | NB |
| RBBP4P4 | retinoblastoma binding protein 4 pseudogene 4 | 3.74 | 0.043902532 | NB |
| RP11-451K18.7 | | 3.74 | 0.049851912 | NB |
| EDDM3B | epididymal protein 3B | 3.74 | 0.027138346 | NB |
| SNORA27 | small nucleolar RNA, H/ACA box 27 | 3.73 | 0.043653892 | NB |
| BPIFB1 | BPI fold containing family B, member 1 | 3.73 | 0.031990541 | NB |
| OLFM3 | olfactomedin 3 | 3.72 | 0.008620126 | NB |
| USP17L6P | ubiquitin specific peptidase 17-like family member 6, p [symbol] | 3.72 | 0.005926234 | NB |
| GABRG2 | gamma-aminobutyric acid (GABA) A receptor, gamma [symbol] | 3.72 | 0.011960052 | NB |
| AL137067.1 | | 3.72 | 0.02857165 | NB |
| KRT8P11 | keratin 8 pseudogene 11 | 3.72 | 0.02857165 | NB |
| TEKT2 | tektin 2 (testicular) | 3.71 | 0.005760347 | NB |
| RNASE3 | ribonuclease, RNase A family, 3 | 3.71 | 0.014391143 | NB |
| GPC4 | glypican 4 | 3.71 | 0.039288394 | NB |
| KLF17 | Kruppel-like factor 17 | 3.7 | 0.009594634 | NB |
| CNGB3 | cyclic nucleotide gated channel beta 3 | 3.69 | 0.004030313 | NB |
| AF165138.7 | | 3.69 | 0.041042494 | NB |
| EFHC2 | EF-hand domain (C-terminal) containing 2 | 3.69 | 0.042306582 | NB |
| GAP43 | growth associated protein 43 | 3.68 | 0.012569126 | NB |
| RETN | resistin | 3.68 | 0.040365068 | NB |
| LIMCH1 | LIM and calponin homology domains 1 | 3.67 | 0.033656613 | NB |
| AC005754.1 | | 3.67 | 0.049100171 | NB |
| CTCFL | CCCTC-binding factor (zinc finger protein)-like | 3.67 | 0.010416999 | NB |
| ADCY5 | adenylate cyclase 5 | 3.66 | 0.036386177 | NB |
| BMPER | BMP binding endothelial regulator | 3.66 | 0.010840451 | NB |
| RP11-1081K18.1 | | 3.66 | 0.030404894 | NB |
| IGFBP3 | insulin-like growth factor binding protein 3 | 3.65 | 0.001483816 | NB |
| CYP7B1 | cytochrome P450, family 7, subfamily B, polypeptide 1 | 3.65 | 0.002148321 | NB |
| RP11-432I13.1 | | 3.63 | 0.007302655 | NB |
| CTD-2206G10.2 | | 3.62 | 0.027138346 | NB |
| CACNA1S | calcium channel, voltage-dependent, L type, alpha 1S s [symbol] | 3.61 | 0.014762458 | NB |
| PDGFA | platelet-derived growth factor alpha polypeptide | 3.61 | 0.001306624 | NB |
| BPI | bactericidal/permeability-increasing protein | 3.61 | 0.004949546 | NB |
| GPR87 | G protein-coupled receptor 87 | 3.6 | 0.034369721 | NB |
| WNK4 | WNK lysine deficient protein kinase 4 | 3.6 | 0.031092971 | NB |
| RP11-791G16.2 | | 3.59 | 0.047168612 | NB |
| CYP2C9 | cytochrome P450, family 2, subfamily C, polypeptide 9 | 3.57 | 0.033515231 | NB |
| SRP68P2 | signal recognition particle 68 kDa pseudogene 2 | 3.57 | 0.01262029 | NB |
| ASIC5 | acid-sensing (proton-gated) ion channel family membe [symbol] | 3.56 | 0.005369816 | NB |
| SLC18A1 | solute carrier family 18 (vesicular monoamine transpor [symbol] | 3.56 | 0.006479884 | NB |
| OR51M1 | olfactory receptor, family 51, subfamily M, member 1 | 3.55 | 0.00713094 | NB |
| LA16c-60H5.7 | | 3.55 | 0.005926234 | NB |
| KCNG3 | potassium voltage-gated channel, subfamily G, membe [symbol] | 3.54 | 0.036500639 | NB |
| GNGT1 | guanine nucleotide binding protein (G protein), gamma [symbol] | 3.53 | 0.042437855 | NB |
| IAPP | islet amyloid polypeptide | 3.53 | 0.016120921 | NB |
| ATP10B | ATPase, class V, type 10B | 3.52 | 0.031092971 | NB |
| ATP1B2 | ATPase, Na+/K+ transporting, beta 2 polypeptide | 3.51 | 0.028688235 | NB |
| FOXE3 | forkhead box E3 | 3.5 | 0.014251282 | NB |
| ANKRD20A4 | ankyrin repeat domain 20 family, member A4 | 3.5 | 0.015742933 | NB |
| RP11-496I2.2 | | 3.5 | 0.019899858 | NB |
| HOTAIRM1 | HOXA transcript antisense RNA, myeloid-specific 1 | 3.49 | 0.009381276 | NB |
| ZNF806 | zinc finger protein 806 | 3.47 | 0.024662434 | NB |
| HIST1H1T | histone cluster 1, H1t | 3.47 | 0.010509409 | NB |
| TSPAN5 | tetraspanin 5 | 3.46 | 0.003059735 | NB |
| RP11-586K2.1 | | 3.46 | 0.017221389 | NB |
| FAM75C2 | SPATA31 subfamily C, member 2 | 3.46 | 0.028688235 | NB |
| RP11-181D18.2 | | 3.45 | 0.024790121 | NB |
| SETP9 | SET pseudogene 9 | 3.44 | 0.031216315 | NB |
| CYP27C1 | cytochrome P450, family 27, subfamily C, polypeptide [symbol] | 3.44 | 0.011925792 | NB |
| SLC4A9 | solute carrier famiy 4, sodium bicarbonate cotransport [symbol] | 3.43 | 0.000583885 | NB |
| SMAD9 | SMAD family member 9 | 3.4 | 0.02643572 | NB |
| GAL3ST1 | galactose-3-O-sulfotransferase 1 | 3.4 | 0.03791799 | NB |
| MAGEB17 | melanoma antigen family B, 17 | 3.4 | 0.034334741 | NB |
| NKX3-2 | NK3 homeobox 2 | 3.39 | 0.016371906 | NB |
| PEX5L | peroxisomal biogenesis factor 5-like | 3.38 | 0.031092971 | NB |
| OR51J1 | olfactory receptor, family 51, subfamily J, member 1 (g [symbol] | 3.38 | 0.036189278 | NB |
| PTCHD2 | patched domain containing 2 | 3.37 | 0.00731008 | NB |
| TMPRSS12 | transmembrane (C-terminal) protease, serine 12 | 3.37 | 0.022558878 | NB |
| CORO2B | coronin, actin binding protein, 2B | 3.37 | 0.008917729 | NB |
| NINL | ninein-like | 3.37 | 0.005926234 | NB |
| PHBP5 | prohibitin pseudogene 5 | 3.36 | 0.009175608 | NB |
| SDAD1P2 | SDA1 domain containing 1 pseudogene 2 | 3.36 | 0.028426013 | NB |
| RP11-645N11.2 | | 3.35 | 0.000869748 | NB |
| SLC22A17 | solute carrier family 22, member 17 | 3.35 | 0.003839527 | NB |
| FAM106A | family with sequence similarity 106, member A | 3.35 | 0.014371388 | NB |
| SOX9 | SRY (sex determining region Y)-box 9 | 3.35 | 0.042370292 | NB |
| AKR1B1P1 | aldehyde reductase family 1, member B1 pseudogene [symbol] | 3.34 | 0.049100171 | NB |
| ABCC8 | ATP-binding cassette, sub-family C (CFTR/MRP), memb [symbol] | 3.34 | 0.023867249 | NB |
| ZNF541 | zinc finger protein 541 | 3.34 | 0.015742933 | NB |
| RP11-136I13.1 | | 3.33 | 0.017952081 | NB |
| RP11-732A19.5 | | 3.33 | 0.028688235 | NB |
| CLEC1A | C-type lectin domain family 1, member A | 3.33 | 0.005926234 | NB |
| NRXN1 | neurexin 1 | 3.32 | 0.042306582 | NB |
| MIR581 | microRNA 581 | 3.32 | 0.012651023 | NB |
| DLEU7 | deleted in lymphocytic leukemia, 7 | 3.32 | 0.019413544 | NB |
| RP11-355N15.1 | | 3.32 | 0.045518278 | NB |
| RP11-111F5.2 | | 3.31 | 0.019674294 | NB |
| KCNC2 | potassium voltage-gated channel, Shaw-related subfam [symbol] | 3.31 | 0.0064423 | NB |
| AMHR2 | anti-Mullerian hormone receptor, type II | 3.3 | 0.002397768 | NB |
| SLC2A12 | solute carrier family 2 (facilitated glucose transporter), [symbol] | 3.28 | 0.004495465 | NB |
| C9orf170 | | 3.28 | 0.01142727 | NB |
| AC012531.25 | | 3.28 | 0.01659065 | NB |
| LIPI | lipase, member I | 3.28 | 0.035096859 | NB |
| PCDHGA12 | protocadherin gamma subfamily A, 12 | 3.27 | 0.049100171 | NB |
| MIPEPP1 | mitochondrial intermediate peplidase pseudogene 1 | 3.27 | 0.02019187 | NB |
| PPP4R4 | protein phosphatase 4, regulatory subunit 4 | 3.27 | 0.046776361 | NB |
| GOLGA6L11P | golgin A6 family-like 11, pseudogene | 3.27 | 0.000599951 | NB |
| AC000110.1 | | 3.26 | 0.016753819 | NB |
| CHRM4 | cholinergic receptor, muscarinic 4 | 3.26 | 0.011041252 | NB |
| BX004987.3 | | 3.24 | 0.049638568 | NB |
| RP11-744D14.1 | | 3.24 | 0.003003823 | NB |
| CSRP3 | cysteine and glycine-rich protein 3 (cardiac LIM protein [symbol] | 3.23 | 0.009241778 | NB |
| NPAS3 | neuronal PAS domain protein 3 | 3.22 | 0.00657893 | NB |
| WNT3 | wingless type MMTV integration site family, member 3 | 3.22 | 0.013811098 | NB |
| RP11-496I2.5 | | 3.2 | 0.010840451 | NB |
| RP3-352A20.1 | | 3.19 | 0.002176072 | NB |
| SYT1 | synaptotagmin I | 3.19 | 0.036500639 | NB |
| SEC14L4 | SEC14-like 4 (S. cerevisiae) | 3.19 | 0.047474072 | NB |
| CELA2A | chymotrypsin-like elastase family, member 2A | 3.18 | 0.016408594 | NB |
| CTD-2158P22.1 | | 3.18 | 0.023867249 | NB |
| PDE6A | phosphodiesterase 6A, cGMP-specific, rod, alpha | 3.18 | 0.007320475 | NB |
| TBX3 | T-box 3 | 3.18 | 0.001007228 | NB |
| ABCA8 | ATP-binding cassette, sub-family A (ABC1), member 8 | 3.18 | 0.049100171 | NB |
| PCDHB2 | protocadherin beta 2 | 3.16 | 0.008917729 | NB |
| DRD2 | dopamine receptor D2 | 3.16 | 0.019111626 | NB |
| ALS2CR11 | amyotrophic lateral sclerosis 2 (juvenile) chromosome | 3.15 | 0.02052367 | NB |
| RP11-510H23.1 | | 3.15 | 0.017138695 | NB |
| FAM194B | glutamate-rich 6B | 3.15 | 0.045518278 | NB |
| KCNJ3 | potassium inwardly-rectifying channel, subfamily J, me [symbol] | 3.13 | 0.002347701 | NB |
| DZIP1 | DAZ interacting zinc finger protein 1 | 3.12 | 0.036386177 | NB |
| HIF3A | hypoxia inducible factor 3, alpha subunit | 3.12 | 0.024328524 | NB |
| SLC17A3 | solute carrier family 17 (organic anion transporter), me [symbol] | 3.11 | 0.038991906 | NB |
| RP11-1134I14.2 | | 3.11 | 0.019371037 | NB |
| RP11-1396O13.8 | | 3.1 | 0.048226887 | NB |
| RP11-307I2.1 | | 3.1 | 0.009325595 | NB |
| RP11-114H24.5 | | 3.1 | 0.039288394 | NB |
| AC020907.2 | | 3.1 | 0.047474072 | NB |
| AC107021.1 | | 3.09 | 0.025748667 | NB |
| GYPE | glycophorin E (MNS blood group) | 3.09 | 0.02287369 | NB |
| SALL4 | spalt-like transcription factor 4 | 3.09 | 0.033656613 | NB |
| SPAG17 | sperm associated antigen 17 | 3.08 | 0.009839457 | NB |
| AFF3 | AF4/FMR2 family, member 3 | 3.07 | 0.039288394 | NB |
| TDGF1 | teratocarcinoma-derived growth factor 1 | 3.07 | 0.049369302 | NB |
| STK19P | | 3.07 | 0.000676183 | NB |
| SFTPA1 | surfactant protein A1 | 3.06 | 0.033575171 | NB |
| SNAI1 | snail family zinc finger 1 | 3.06 | 0.00657893 | NB |
| AC092155.2 | | 3.05 | 0.047995343 | NB |
| RAPGEF4 | Rap guanine nucleotide exchange factor (GEF) 4 | 3.05 | 0.02052367 | NB |
| AKR1B15 | aldo-keto reductase family 1, member B15 | 3.05 | 0.033277256 | NB |
| ADAMTS7 | ADAM metallopeptidase with thrombospondin type 1 r [symbol] | 3.05 | 0.008917729 | NB |
| COLEC12 | collectin sub-family member 12 | 3.05 | 0.045638568 | NB |
| PTGS2 | prostaglandin-endoperoxide synthase 2 (prostaglandin [symbol] | 3.04 | 0.039288394 | NB |
| ULBP3 | UL16 binding protein 3 | 3.04 | 0.010509409 | NB |
| HMGB3P31 | high mobility group box 3 pseudogene 31 | 3.04 | 0.020318802 | NB |
| AQP7P1 | aquaporin 7 pseudogene 1 | 3.03 | 0.039288394 | NB |
| ABCC6P2 | ATP-binding cassette, sub-family C, member 6 pseudog [symbol] | 3.03 | 0.039234101 | NB |
| ZNF331 | zinc finger protein 331 | 3.03 | 7.63E−05 | NB |
| KY | kyphoscoliosis peptidase | 3.02 | 0.04213223 | NB |
| GS1-184P14.1 | | 3.01 | 0.01305666 | NB |
| DMD | dystrophin | 3 | 0.02643572 | NB |
| AC079354.1 | | 2.99 | 0.000590409 | NB |
| MS4A3 | membrane-spanning 4-domains, subfamily A, member [symbol] | 2.99 | 0.021446576 | NB |
| C14orf57 | | 2.99 | 0.039234101 | NB |
| C14orf132 | | 2.99 | 0.033656613 | NB |
| MSTN | myostatin | 2.98 | 0.021083625 | NB |
| AL772307.1 | | 2.98 | 0.016310813 | NB |
| PIEZO2 | piezo-type mechanosensitive ion channel component 2 | 2.98 | 0.013100955 | NB |
| ZNF355P | zinc finger protein 355, pseudogene | 2.98 | 0.010441837 | NB |
| KLK14 | kallikrein-related peptidase 14 | 2.97 | 0.021373132 | NB |
| MACROD2 | MACRO domain containing 2 | 2.97 | 0.024328524 | NB |
| RP11-521J5.1 | | 2.96 | 0.031092971 | NB |
| TLX2 | T-cell leukemia homeobox 2 | 2.95 | 0.04488914 | NB |
| RPL7AP26 | ribosomal protein L7a pseudogene 25 | 2.95 | 0.036500639 | NB |
| MOXD1 | monooxygenase, DBH-like 1 | 2.95 | 0.02643572 | NB |
| RP5-1198O20.4 | | 2.94 | 0.027941793 | NB |
| RP11-190P13.1 | | 2.94 | 0.025784335 | NB |
| SOSTDC1 | sclerostin domain containing 1 | 2.94 | 0.02875596 | NB |
| HCAR1 | hydroxycarboxylic acid receptor 1 | 2.94 | 0.015249492 | NB |
| TCP11 | t-complex 11, testis-specific | 2.93 | 0.012073496 | NB |
| FXYD1 | FXYD domain containing ion transport regulator 1 | 2.93 | 0.022360081 | NB |
| C7orf61 | | 2.92 | 0.012651023 | NB |
| DDX25 | DEAD (Asp-Glu-Ala-Asp) box helicase 25 | 2.92 | 0.035185369 | NB |
| OXTR | oxytocin receptor | 2.91 | 0.011547361 | NB |
| FAM75A1 | SPATA31 subfamily A, member 1 | 2.91 | 0.012492516 | NB |
| AC016251.1 | | 2.91 | 0.012118209 | NB |
| AC008079.9 | | 2.91 | 0.039259375 | NB |
| MIR548I1 | microRNA 548i-1 | 2.89 | 0.039934696 | NB |
| RP11-510H23.3 | | 2.89 | 0.019413544 | NB |
| RPS20P22 | ribosomal protein S20 pseudogene 22 | 2.89 | 0.035096859 | NB |
| C1orf173 | | 2.88 | 0.03877208 | NB |
| HIGD1AP9 | HIG1 hypoxia inducible domain family, member 1A pse [symbol] | 2.88 | 0.008789839 | NB |
| ST13P12 | suppression of tumorigenicity 13 (colon carcinoma) (Hs [symbol] | 2.87 | 0.0049729 | NB |
| RP11-15J10.8 | | 2.87 | 0.020318802 | NB |
| DCHS1 | dachsous cadherin-related 1 | 2.87 | 0.02643572 | NB |
| TAF7L | TAF7-like RNA polymerase II, TATA box binding protein | 2.87 | 0.027941793 | NB |
| RP11-1286E23.6 | | 2.86 | 0.036386177 | NB |
| RP11-798K3.4 | | 2.86 | 0.031076174 | NB |
| AC073264.10 | | 2.85 | 0.032737245 | NB |
| CMYA5 | cardiomyopathy associated 5 | 2.84 | 0.018812935 | NB |
| HOXA3 | homeobox A3 | 2.84 | 0.033656613 | NB |
| RP11-812E19.6 | | 2.83 | 0.015742933 | NB |
| UBE2U | ubiquitin-conjugating enzyme E2U (putative) | 2.82 | 0.025644286 | NB |
| RP11-277P12.20 | | 2.82 | 0.019058997 | NB |
| CBLN4 | cerebellin 4 precursor | 2.82 | 0.026146007 | NB |
| RP11-146D12.2 | | 2.81 | 0.042370292 | NB |
| PRSS55 | protease, serine, 55 | 2.8 | 0.028426013 | NB |
| RTDR1 | | 2.8 | 0.033575171 | NB |
| EPHA2 | EPH receptor 42 | 2.78 | 0.014371388 | NB |
| ULBP2 | UL16 binding protein 2 | 2.78 | 0.036386177 | NB |
| SPEM1 | spermatid maturation 1 | 2.78 | 0.023187328 | NB |
| KRT20 | keratin 20 | 2.78 | 0.012799782 | NB |
| RP11-325P15.1 | | 2.77 | 0.031092971 | NB |
| LONRF2 | LON peptidase N-terminal domain and ring finger 2 | 2.77 | 0.022360081 | NB |
| CDH10 | cadherin 10, type 2 (T2-cadherin) | 2.77 | 0.016475123 | NB |
| SORCS3 | sortilin-related VPS10 domain containing receptor 3 | 2.77 | 0.003476545 | NB |
| ARHGAP40 | Rho GTPase activating protein 40 | 2.77 | 0.00654708 | NB |
| HOXA2 | homeobox A2 | 2.76 | 0.013100955 | NB |
| C12orf50 | | 2.76 | 0.014949579 | NB |
| FAM19A1 | family with sequence similarity 19 (chemokine (C-C mo [symbol] | 2.75 | 0.019074797 | NB |
| RP11-695J4.2 | | 2.75 | 0.017818411 | NB |
| CTD-2201I18.1 | uncharacterized LOC101929215 | 2.74 | 0.02643572 | NB |
| CLDN2 | claudin 2 | 2.74 | 0.016310813 | NB |
| PRRX1 | paired related homeobox 1 | 2.73 | 0.042370292 | NB |
| FAM46A | family with sequence similarity 46, member A | 2.73 | 0.003059735 | NB |
| CACNA2D4 | calcium channel, voltage-dependent, alpha 2/delta sub [symbol] | 2.73 | 0.049100171 | NB |
| RP11-400L8.2 | | 2.72 | 0.017559073 | NB |
| ASS1P7 | argininosurxinate synthetase 1 pseudogene 7 | 2.72 | 0.024493172 | NB |
| NDST4 | N-deacetylase/N-sulfatransferase (heparan glucosamin [symbol] | 2.72 | 0.03781544 | NB |
| KB-1554H10.1 | | 2.72 | 0.019058997 | NB |
| NYNRIN | NYN domain and retroviral integrase containing | 2.72 | 0.036386177 | NB |
| CADM4 | cell adhesion molecule 4 | 2.72 | 0.008070194 | NB |
| GABRB2 | gamma-aminobutyric acid (GABA) A receptor, beta 2 | 2.71 | 0.00731008 | NB |
| HEPACAM | hepatic and glial cell adhesion molecule | 2.71 | 0.02247963 | NB |
| RP11-903H12.2 | | 2.71 | 0.027650005 | NB |
| CTA-211A9.5 | | 2.71 | 0.006592317 | NB |
| BHLHB9 | basic helix-loop-helix domain containing, class B, 9 | 2.71 | 0.005329798 | NB |
| RP11-157D18.2 | | 2.7 | 0.020318802 | NB |
| RP11-317B7.2 | | 2.7 | 0.038991906 | NB |
| FAM198B | family with sequence similarity 198, member B | 2.7 | 0.015742933 | NB |
| FAM81B | family with sequence similarity 81, member B | 2.7 | 0.042306582 | NB |
| RCAN2 | regulator of calcineurin 2 | 2.7 | 0.022360081 | NB |
| RP11-533F5.2 | | 2.69 | 0.025144552 | NB |
| RP11-597D13.9 | | 2.69 | 0.022360081 | NB |
| KLHL31 | kelch-like family member 31 | 2.69 | 0.031835936 | NB |
| EIF3EP1 | eukaryotic translation initiation factor 3, subunit E pse [symbol] | 2.69 | 0.000438786 | NB |
| MLLT11 | myeloid/lymphoid or mixed-lineage leukemia (trithora [symbol] | 2.68 | 0.003430441 | NB |
| SERPINC1 | serpin peptidase inhibitor, clade C (antithrombin), me [symbol] | 2.68 | 0.004785714 | NB |
| RP11-280F2.1 | | 2.68 | 0.00713094 | NB |
| PCDHGA3 | protocadherin gamma subfamily A, 3 | 2.68 | 0.003839527 | NB |
| SPRY4 | sprouty homolog 4 (Drosophila) | 2.68 | 0.039288394 | NB |
| BMP6 | bone morphogenetic protein 6 | 2.68 | 0.008070194 | NB |
| SSU72P8 | SSU72 pseudogene 8 | 2.68 | 0.006562428 | NB |
| PEX5L-AS1 | PEX5L antisense RNA 1 | 2.66 | 0.033545013 | NB |
| LRP4 | low density lipoprotein receptor-related protein 4 | 2.66 | 0.011925792 | NB |
| NPM1P8 | nucleophosmin 1 (nucleolar phosphoprotein B23, num [symbol] | 2.66 | 0.027941793 | NB |
| SHROOM1 | shroom family member 1 | 2.65 | 0.008070194 | NB |
| HMGN2P10 | high mobility group nucleasomal binding domain 2 pse [symbol] | 2.65 | 0.045518278 | NB |
| DGAT2L6 | diacylglycerol O-acyltransferase 2-like 6 | 2.65 | 0.018415671 | NB |
| RP11-944L7.4 | | 2.64 | 0.040821352 | NB |
| OTOP1 | otopetrin 1 | 2.64 | 0.03495366 | NB |
| PCDHGC3 | protocadherin gamma subfamily C, 3 | 2.64 | 0.02643572 | NB |
| GSG1 | germ cell associated 1 | 2.64 | 0.001853615 | NB |
| VWA3A | von Willebrand factor A domain containing 3A | 2.64 | 0.0186415 | NB |
| LMOD3 | leiomodin 3 (fetal) | 2.63 | 0.01785722 | NB |
| PIRT | phosphoinositide-interacting regulator of transient rec [symbol] | 2.63 | 0.00447648 | NB |
| RPL36P4 | ribosomal protein L36 pseudogene 4 | 2.63 | 0.007320475 | NB |
| THBS4 | thrombospondin 4 | 2.62 | 0.049100171 | NB |
| RP11-482D24.3 | | 2.62 | 0.013181478 | NB |
| SULT1A1 | sulfotransferase family, cytosolic, 1A, phenol-preferrin [symbol] | 2.62 | 0.018812935 | NB |
| CEACAM8 | carcinoembryonic antigen-related cell adhesion molec [symbol] | 2.62 | 0.02287369 | NB |
| LNX1 | ligand of numb-protein X 1, E3 ubiquitin protein ligase | 2.61 | 0.014371388 | NB |
| GRM7 | glutamate receptor, metabotropic 7 | 2.6 | 0.020255042 | NB |
| RP11-651P23.2 | | 2.6 | 0.029382731 | NB |
| AC097467.2 | | 2.6 | 0.033794271 | NB |
| DBX2 | developing brain homeobox 2 | 2.6 | 0.003036454 | NB |
| AL445989.1 | | 2.6 | 0.03995294 | NB |
| TEKT5 | tektin 5 | 2.6 | 0.016408594 | NB |
| CAGE1 | cancer antigen 1 | 2.59 | 0.012569126 | NB |
| OR52E6 | olfactory receptor, family 52, subfamily E, member 6 | 2.59 | 0.016753819 | NB |
| CTD-2314B22.3 | | 2.59 | 0.004785714 | NB |
| ZNF177 | zinc finger protein 177 | 2.59 | 0.045638568 | NB |
| AP000281.1 | | 2.59 | 0.043523654 | NB |
| CELA2B | chymotrypsin-like elastase family, member 2B | 2.58 | 0.001487356 | NB |
| LHCGR | luteinizing hormone/choriogonadotropin receptor | 2.58 | 0.039288394 | NB |
| GRID2 | glutamate receptor, ionotropic, delta 2 | 2.58 | 0.019899858 | NB |
| LRRC17 | leucine rich repeat containing 17 | 2.58 | 0.001483816 | NB |
| OR51I2 | olfactory receptor, family 51, subfamily I, member 2 | 2.58 | 0.007916312 | NB |
| RP11-166D19.1 | | 2.58 | 0.023509294 | NB |
| ZDHHC22 | zinc finger, DHHC-type containing 22 | 2.58 | 0.009476909 | NB |
| KSR1 | kinase suppressor of ras 1 | 2.58 | 0.014371388 | NB |
| EMID1 | EMI domain containing 1 | 2.58 | 0.018812935 | NB |
| OR6K3 | olfactory receptor, family 6, subfamily K, member 3 | 2.57 | 0.039717587 | NB |
| SLC38A3 | solute carrier family 38, member 3 | 2.57 | 0.04352477 | NB |
| B3GALNT1 | beta-1,3-N-acetylgalactosaminyltransferase 1 (globosid [symbol] | 2.57 | 0.033656613 | NB |
| CTD-2337A12.1 | | 2.57 | 0.019575576 | NB |
| GALNT8 | polypeptide N-acetylgalactosa minyltransferase 8 | 2.57 | 0.033656613 | NB |
| SAGE1 | sarcoma antigen 1 | 2.57 | 0.030546079 | NB |
| OR52D1 | olfactory receptor, family 52, subfamily D, member 1 | 2.56 | 0.029028339 | NB |
| ALX4 | ALX homeobox 4 | 2.56 | 0.009204866 | NB |
| KCNMB4 | potassium large conductance calcium-activated channe [symbol] | 2.56 | 0.036386177 | NB |
| AL589743.1 | | 2.56 | 0.001007228 | NB |
| AP000322.53 | | 2.56 | 0.016371906 | NB |
| HBXIPP1 | | 2.55 | 0.024542839 | NB |
| CHN1 | chimerin 1 | 2.55 | 0.028688235 | NB |
| TACR3 | tachykinin receptor 3 | 2.55 | 0.011399948 | NB |
| AC008265.2 | | 2.55 | 0.033214335 | NB |
| STRADBP1 | STE20-related kinase adaptor beta pseudogene 1 | 2.55 | 0.011576251 | NB |
| C9orf57 | | 2.55 | 0.019540488 | NB |
| DPF3 | D4, zinc and double PHD fingers, famiy 3 | 2.55 | 0.039288394 | NB |
| GOLGA6B | golgin A6 family, member B | 2.55 | 0.039316473 | NB |
| GNAS-AS1 | GNAS antisense RNA 1 | 2.55 | 0.000379081 | NB |
| RP13-140E4.1 | | 2.55 | 0.021446576 | NB |
| LL0XNC01-1161E7.1 | | 2.55 | 0.02857165 | NB |
| OR51I1 | olfactory receptor, family 51, subfamily I, member 1 | 2.54 | 0.015079112 | NB |
| UNC13C | unc-13 homolog C (C. elegans) | 2.54 | 0.04694431 | NB |
| RP11-1079K10.1 | | 2.54 | 0.038228592 | NB |
| GOLGA6L16P | golgin A6 family-like 16, pseudogene | 2.54 | 0.017521647 | NB |
| MMEL1 | membrane metallo-endopeptidase-like 1 | 2.53 | 0.027650005 | NB |
| CTD-2330J20.2 | | 2.53 | 0.020779381 | NB |
| RRM2P3 | ribonucleotide reductase M2 polypeptide pseudogene | 2.53 | 0.021040385 | NB |
| AGTR1 | angiotensin II receptor, type 1 | 2.52 | 0.039316473 | NB |
| RELN | reelin | 2.52 | 0.02052367 | NB |
| HMGN1P18 | high mobility group nudeasome binding domain 1 pse [symbol] | 2.52 | 0.035185369 | NB |
| ANGPT1 | angiopoietin 1 | 2.52 | 0.024328524 | NB |
| GRIK1 | glutamate receptor, ionotropic, kainate 1 | 2.52 | 0.000881664 | NB |
| RP11-267N12.3 | | 2.51 | 0.003839527 | NB |
| KIAA1239 | NACHT and WD repeat domain containing 2 | 2.51 | 0.00099915 | NB |
| AGBL3 | ATP/GTP binding protein-like 3 | 2.51 | 0.024328524 | NB |
| RP11-32B5.2 | | 2.51 | 0.028184742 | NB |
| ATP2B3 | ATPase, Ca++ transporting, plasma membrane 3 | 2.51 | 0.033698056 | NB |
| TAS1R1 | taste receptor, type 1, member 1 | 2.5 | 0.017138695 | NB |
| ANKRD20A14P | ankyrin repeat domain 20 family, member A14, pseudo [symbol] | 2.5 | 0.049100171 | NB |
| RGS5 | regulator of G-protein signaling 5 | 2.5 | 0.002421425 | NB |
| SOWAHA | sosondowah ankyrin repeat domain family member A | 2.5 | 0.030546079 | NB |
| OR52E4 | olfactory receptor, family 52, subfamily E, member 4 | 2.5 | 0.023557449 | NB |
| ANO3 | anoctamin 3 | 2.5 | 0.02019187 | NB |
| TMEFF1 | transmembrane protein with EGF-like and two follistati [symbol] | 2.49 | 0.005477973 | NB |
| C12orf28 | | 2.49 | 0.035978444 | NB |
| CORIN | corin, serine peptidase | 2.48 | 0.033656613 | NB |
| RP11-309L24.6 | | 2.48 | 0.014969485 | NB |
| SYNM | synemin, intermediate filament protein | 2.48 | 0.003059735 | NB |
| PDHA2 | pyruvate dehydrogenase (lipoamide) alpha 2 | 2.47 | 0.015181716 | NB |
| ANGPT2 | angiopcietin 2 | 2.47 | 0.004785714 | NB |
| S1PR3 | sphingosine-1-phosphate receptor 3 | 2.47 | 0.031092971 | NB |
| ANKRD20A8P | ankyrin repeat domain 20 family, member A8, pseudog [symbol] | 2.46 | 0.031092971 | NB |
| OBP2B | odorant binding protein 2B | 2.46 | 0.046783458 | NB |
| HHEX | hematopoietically expressed homeobox | 2.46 | 0.008070194 | NB |
| AC007731.1 | | 2.46 | 0.045238769 | NB |
| CLCN4 | chloride channel, voltage-sensitive 4 | 2.46 | 0.018812935 | NB |
| HSPA7 | heat shock 70 kDa protein 7(HSP70B) | 2.45 | 0.031092971 | NB |
| C7orf58 | | 2.45 | 0.022360081 | NB |
| ANKRD20A3 | ankyrin repeat domain 20 family, member A3 | 2.45 | 0.028688235 | NB |
| C2orf66 | | 2.44 | 0.024790121 | NB |
| OR56B4 | olfactory receptor, family 56, subfamily B, member 4 | 2.44 | 0.020968365 | NB |
| PCDHGB1 | protocadherin gamma subfamily B, 1 | 2.43 | 0.022360081 | NB |
| RP1-97D16.1 | | 2.43 | 0.02857165 | NB |
| PPP1R9A | protein phosphatase 1, regulatory subunit 9A | 2.43 | 0.036386177 | NB |
| TMC5 | transmembrane channel-like 5 | 2.43 | 0.033351877 | NB |
| TEX11 | testis expressed 11 | 2.43 | 0.01305666 | NB |
| PADI6 | peptidyl arginine deiminase, type VI | 2.42 | 0.048733769 | NB |
| RP11-481K9.4 | | 2.42 | 0.0186415 | NB |
| RP11-496I2.6 | | 2.42 | 0.009839457 | NB |
| RP11-310A13.2 | | 2.41 | 0.01373806 | NB |
| RP1-66E7.1 | | 2.41 | 0.045812142 | NB |
| RP11-463J10.2 | | 2.41 | 0.031092971 | NB |
| SULT1C4 | sulfotransferase family, cytosolic, 1C, member 4 | 2.4 | 0.003430441 | NB |
| AC073629.2 | | 2.4 | 0.025822313 | NB |
| CTD-2349P21.1 | | 2.4 | 0.002682049 | NB |
| TCN1 | transcobalamin I (vitamin B12 binding protein, R binde [symbol] | 2.39 | 0.039288394 | NB |
| SYT16 | synaptotagmin XVI | 2.39 | 0.00346671 | NB |
| RP11-454K24.1 | | 2.39 | 0.007806012 | NB |
| SLC35G2 | solute carrier farniy 35, member G2 | 2.38 | 0.028688235 | NB |
| RP11-321E8.1-001 | | 2.38 | 0.002608342 | NB |
| RP11-6O2.4 | | 2.38 | 0.003839527 | NB |
| HSPA6 | heat shock 70 kDa protein 6 (HSP70B′) | 2.37 | 0.024328524 | NB |
| RP11-136C24.1 | | 2.37 | 0.042079896 | NB |
| AC073343.1 | | 2.37 | 0.004185714 | NB |
| GAGE10 | G antigen 10 | 2.37 | 0.047897625 | NB |
| ANKRD20A2 | ankyrin repeat domain 20 family, member A2 | 2.36 | 0.022360081 | NB |
| DUSP13 | dual specificity phosphatase 13 | 2.36 | 0.016199164 | NB |
| ITM2C | integral membrane protein 2C | 2.35 | 0.001902564 | NB |
| RP11-397E7.2 | | 2.35 | 0.039148946 | NB |
| OSMR | oncostatin M receptor | 2.35 | 0.042370292 | NB |
| RP11-10F11.2 | | 2.35 | 0.013831074 | NB |
| TFPI2 | tissue factor pathway inhibitor 2 | 2.35 | 0.047168612 | NB |
| RP11-530N7.2 | | 2.35 | 0.033852011 | NB |
| POU5F1B | POU class 5 homeobox 1B | 2.34 | 0.045478051 | NB |
| TECTA | tectorin alpha | 2.34 | 0.013100955 | NB |
| RASL10B | RAS-like, family 10, member B | 2.34 | 0.09883796 | NB |
| CYP2G1P | cytochrome P450, family 2, subfamily G, polypeptide 1 | 2.34 | 0.012569126 | NB |
| RP4-610C12.4 | | 2.34 | 0.009966462 | NB |
| OR11L1 | olfactory receptor, family 11, subfamily L, member 1 | 2.33 | 0.029382731 | NB |
| CNTN6 | contactin 6 | 2.33 | 0.031092971 | NB |
| C4orf19 | | 2.33 | 0.004949546 | NB |
| YIPF7 | Yip1 domain family, member 7 | 2.33 | 0.003640543 | NB |
| PCDHGC5 | protocadherin gamma subfamily C, 5 | 2.33 | 0.005329798 | NB |
| ADGB | androglobin | 2.33 | 0.022638595 | NB |
| PSMC1P3 | proteasome (prosome, macropain) 26S subunit, ATPas [symbol] | 2.33 | 0.043902532 | NB |
| FGF2 | fibroblast growth factor 2 (basic) | 2.32 | 0.022360081 | NB |
| AC008537.2 | | 2.32 | 0.002180177 | NB |
| CTD-2224J9.4 | | 2.32 | 0.032296489 | NB |
| CSPG5 | chondroitin sulfate proteoglycan 5 (neuroglycan C) | 2.31 | 0.028688235 | NB |
| RP11-254A17.1 | | 2.31 | 0.01373806 | NB |
| NACAD | NAC alpha domain containing | 2.31 | 0.031092971 | NB |
| LMOD2 | leiomodin 2 (cardiac) | 2.31 | 0.047168612 | NB |
| BAALC | brain and acute leukemia, cytoplasmic | 2.31 | 0.045638568 | NB |
| RP11-84C10.2 | | 2.31 | 0.042339272 | NB |
| HNRNPA1P24 | heterogeneous nuclear ribonucleoprotein A1 pseudoge [symbol] | 2.3 | 0.017952081 | NB |
| KCNMB2 | potassium large conductance calcium-activated channe [symbol] | 2.3 | 0.02287369 | NB |
| NREP | neuronal regeneration related protein | 2.3 | 0.003430441 | NB |
| PCMTD1P3 | protein-L-isoaspartate (D-aspartate) O-methyltransfera [symbol] | 2.3 | 0.015181716 | NB |
| ADRB3 | adrenoceptor beta 3 | 2.3 | 0.035978444 | NB |
| PA2G4P2 | proliferation-associated 2G4 pseudogene 2 | 2.3 | 0.03877208 | NB |
| HOXD10 | homeobox D10 | 2.29 | 0.002421425 | NB |
| GNG5P3 | guanine nucleotide binding protein (G protein), gamma [symbol] | 2.29 | 0.011925792 | NB |
| KCNJ8 | potassium inwardly-rectifying channel, subfamily J, me [symbol] | 2.29 | 0.02643572 | NB |
| RP11-182J1.13 | | 2.29 | 0.049100171 | NB |
| LIMS3 | LIM and senescent cell antigen-like domains 3 | 2.28 | 0.032616447 | NB |
| HOXA-AS2 | HOXA cluster antisense RNA 2 | 2.28 | 0.028688235 | NB |
| TRPC4 | transient receptor potential cation channel, subfamily [symbol] | 2.28 | 0.02052367 | NB |
| DNER | delta/notch-like EGF repeat containing | 2.27 | 0.013528999 | NB |
| C5orf60 | | 2.27 | 0.030628105 | NB |
| NECAB1 | N-terminal EF-hand calcium binding protein 1 | 2.27 | 0.022828147 | NB |
| RP11-144A16.1 | | 2.27 | 0.014371388 | NB |
| LINC00552 | long intergenic non-protein coding RNA 552 | 2.27 | 0.04104249 | NB |
| MEG8 | maternally expressed 8 (non-protein coding) | 2.27 | 0.022042996 | NB |
| AC005562.3 | | 2.27 | 0.01377845 | NB |
| NAP1L5 | nucleosome assembly protein 1-like 5 | 2.26 | 0.008070194 | NB |
| NXPH1 | neurexophilin 1 | 2.26 | 0.046077602 | NB |
| BBOX1 | butyrobetaine (gamma), 2-oxoglutarate dioxygenase (g [symbol] | 2.26 | 0.045478051 | NB |
| SCN4B | sodium channel, voltage-gated, type IV, beta subunit | 2.26 | 0.024328524 | NB |
| ZFP82 | ZFP82 zinc finger protein | 2.26 | 0.045638568 | NB |
| RP1-83M4.2 | | 2.25 | 0.004965109 | NB |
| FABP9 | fatty acid binding protein 9, testis | 2.25 | 0.004124703 | NB |
| NEB | nebulin | 2.24 | 0.049100171 | NB |
| SPP1 | secreted phosphoprotein 1 | 2.24 | 0.049100171 | NB |
| NPY6R | neuropeptide Y receptor Y6 (pseudogene) | 2.24 | 0.049100171 | NB |
| PCDHB12 | protocadherin beta 12 | 2.24 | 0.002421425 | NB |
| RP1-95L4.4 | | 2.24 | 0.017221389 | NB |
| C15orf26 | | 2.24 | 0.02052367 | NB |
| IGSF1 | immunoglobuin superfamily, member 1 | 2.24 | 0.037056891 | NB |
| COL6A4P1 | collagen, type VI, alpha 4 pseudogene 1 | 2.23 | 0.030546079 | NB |
| PCDHB10 | protocadherin beta 10 | 2.23 | 0.005329798 | NB |
| DPYSL3 | dihydropyrimidinase-like 3 | 2.23 | 0.031092971 | NB |
| HOXA5 | homeobox A5 | 2.23 | 0.005329798 | NB |
| RP11-561C5.5 | | 2.23 | 0.009531305 | NB |
| AP000525.10 | | 2.23 | 0.036386177 | NB |
| FOXO6 | forkhead box O6 | 2.22 | 0.036386177 | NB |
| MIR571 | microRNA 571 | 2.22 | 0.041739925 | NB |
| SLC22A7 | solute carrier family 22 (organic anion transporter), me [symbol] | 2.22 | 0.038448428 | NB |
| AL589743.2 | | 2.22 | 0.035185369 | NB |
| DLK1 | delta-like 1 homolog (Drosophila) | 2.22 | 0.047935027 | NB |
| RP11-316M1.11 | | 2.21 | 0.02643572 | NB |
| C1orf189 | | 2.21 | 0.027138346 | NB |
| RP11-182J1.14 | | 2.21 | 0.013100955 | NB |
| snoU2_19 | | 2.21 | 0.031216315 | NB |
| GSTM3 | glutathione S-transferase mu 3 (brain) | 2.2 | 0.024328524 | NB |
| TMEM30C | transmembrane protein 30C | 2.2 | 0.019201979 | NB |
| CSGALNACT1 | chondroitin sulfate N-acetylgalactosaminyltransferase [symbol] | 2.2 | 0.004785714 | NB |
| NAP1L1P1 | nucleosome assembly protein 1-like 1 pseudogene 1 | 2.2 | 0.032737245 | NB |
| RP11-522B15.6 | | 2.2 | 0.04876748 | NB |
| PRAMEF15 | PRAME famity member 15 | 2.19 | 0.046783458 | NB |
| HPCA | hippocalcin | 2.19 | 0.009764943 | NB |
| ISPD | isoprenoid synthase domain containing | 2.19 | 0.001483816 | NB |
| RP11-365P13.3 | | 2.19 | 0.021985463 | NB |
| AL132709.8 | | 2.19 | 0.045588897 | NB |
| GOLGA6A | golgin A6 family, member A | 2.19 | 0.045638568 | NB |
| AC048382.4 | | 2.19 | 0.02052367 | NB |
| MYO15A | myosin XVA | 2.19 | 0.031092971 | NB |
| C1orf61 | | 2.18 | 0.042306582 | NB |
| KCNJ10 | potassium inwardly-rectifying channel, subfamily J, me [symbol] | 2.18 | 0.045638568 | NB |
| TNNI1 | troponin I type 1 (skeletal, slow) | 2.18 | 0.049758592 | NB |
| SCN2A | sodium channel, voltage-gated, type II, alpha subunit | 2.18 | 0.012651023 | NB |
| NSUN7 | NOP2/Sun domain family, member 7 | 2.18 | 0.049100171 | NB |
| PRSS48 | protease, serine, 48 | 2.18 | 0.018812935 | NB |
| HBEGF | heparin-binding EGF-like growth factor | 2.18 | 0.001902564 | NB |
| FAM75A6 | SPATA31 subfamily A, member 6 | 2.18 | 0.026579731 | NB |
| IMPDH1P11 | IMP (inosine monophosphate) dehydrogenase 1 pseud [symbol] | 2.18 | 0.037640265 | NB |
| RP11-145A3.4 | | 2.17 | 0.011547361 | NB |
| 3-Mar | membrane-associated ring finger (C3HC4) 3, E3 ubiquit [symbol] | 2.17 | 0.002724323 | NB |
| CAMK2B | calcium/calmodulin-dependent protein kinase II beta | 2.17 | 0.03791799 | NB |
| C9orf171 | | 2.17 | 0.005662083 | NB |
| RBM20 | RNA binding motif protein 20 | 2.17 | 0.028688235 | NB |
| ASCL3 | achaete-scute family bHLH transcription factor 3 | 2.17 | 0.021083625 | NB |
| PDE4B | phosphodiesterase 4B, cAMP-specific | 2.16 | 0.033656613 | NB |
| SERPINE2 | serpin peptidase inhibitor, clade E (nexin, plasminogen [symbol] | 2.16 | 0.008917729 | NB |
| PCDHGB2 | protocadherin gamma subfamily B, 2 | 2.16 | 0.000280919 | NB |
| ZNF204P | zinc finger protein 204, pseudogene | 2.16 | 0.045512017 | NB |
| 14-Sep | septin 14 | 2.16 | 0.013119454 | NB |
| RP11-661G16.2 | | 2.16 | 0.02052367 | NB |
| SRP68P3 | signal recognition particle 68 kDa pseudogene 3 | 2.16 | 0.029028339 | NB |
| NEFH | neurofilament, heavy polypeptide | 2.16 | 0.042370292 | NB |
| ADCY10 | adenylate cyclase 10 (soluble) | 2.15 | 0.002148321 | NB |
| RP11-472B18.1 | | 2.15 | 0.004785714 | NB |
| RP11-673E1.3 | | 2.15 | 0.004290131 | NB |
| AE000662.92 | | 2.14 | 0.039148946 | NB |
| KCNMB3P1 | potassium large conductance calcium-activated channe [symbol] | 2.14 | 0.008070194 | NB |
| MIR1231 | microRNA 1231 | 2.13 | 0.033553777 | NB |
| WDR64 | WD repeat domain 64 | 2.13 | 0.012073496 | NB |
| AC004980.10 | | 2.13 | 0.000671309 | NB |
| SLC26A3 | solute carrier family 26 (anion exchanger), member 3 | 2.13 | 0.039253648 | NB |
| SNORA49 | small nucleolar RNA, H/ACA box 49 | 2.13 | 0.022360081 | NB |
| ESRRB | estrogen-related receptor beta | 2.13 | 0.042306582 | NB |
| AC011551.2 | | 2.13 | 0.026864606 | NB |
| ARHGAP29 | Rho GTPase activating protein 29 | 2.12 | 0.039288394 | NB |
| AL583842.6 | | 2.12 | 0.036386177 | NB |
| LRRC9 | leucine rich repeat containing 9 | 2.12 | 0.02643572 | NB |
| NID1 | nidogen 1 | 2.11 | 0.004785714 | NB |
| RP11-13J8.1 | | 2.11 | 0.004220588 | NB |
| PCDHB18 | | 2.11 | 0.011925792 | NB |
| ZNF679 | zinc finger protein 679 | 2.11 | 0.046783458 | NB |
| RP11-959I15.1 | | 2.11 | 0.02939697 | NB |
| AP000593.6 | | 2.11 | 0.026579731 | NB |
| TSPY26P | testis specific protein, Y-linked 26, pseudogene | 2.11 | 0.042370292 | NB |
| FBLIM1 | filamin binding LIM protein 1 | 2.1 | 0.045638568 | NB |
| PAPPA2 | pappalysin 2 | 2.1 | 0.045478051 | NB |
| OFD1P17 | OFD1 pseudogene 17 | 2.1 | 0.022360081 | NB |
| RP11-43D2.6 | | 2.1 | 0.049100171 | NB |
| GRAMD3 | GRAM domain containing 3 | 2.1 | 0.036386177 | NB |
| ICK | intestinal cell (MAK-like) kinase | 2.1 | 0.015742933 | NB |
| EPB41L2 | erythrocyte membrane protein band 4.1-like 2 | 2.1 | 0.001902564 | NB |
| TUSC3 | tumor suppressor candidate 3 | 2.1 | 0.02052367 | NB |
| RP11-1102P16.1 | | 2.1 | 0.033545013 | NB |
| RPL19P14 | ribosomal protein L19 pseudogene 14 | 2.1 | 0.005477973 | NB |
| RP11-654A16.3 | | 2.1 | 0.003321047 | NB |
| TMPRSS9 | transmembrane protease, serine 9 | 2.1 | 0.018812935 | NB |
| FNBP1L | formin binding protein 1-like | 2.09 | 0.005329798 | NB |
| ASNSP5 | asparagine synthetase pseudogene 5 | 2.09 | 0.024790121 | NB |
| AC007272.3 | | 2.09 | 0.004220588 | NB |
| PLK2 | polo-like kinase 2 | 2.09 | 0.036386177 | NB |
| PLAC8L1 | PLAC8-like 1 | 2.09 | 0.021985463 | NB |
| GAPDHP73 | glyceraldehyde-3-phosphate dehydrogenase pseudoge [symbol] | 2.09 | 0.039934696 | NB |
| RP11-529J17.2 | | 2.09 | 0.005329798 | NB |
| MAP7D2 | MAP 7 domain containing 2 | 2.09 | 0.047168612 | NB |
| ASPRV1 | aspartic peptidase, retroviral-like 1 | 2.08 | 0.017221389 | NB |
| SLC10A4 | solute carrier family 10, member 4 | 2.08 | 0.015740659 | NB |
| DCHS2 | dachsous cadherin-related 2 | 2.08 | 0.036386177 | NB |
| PCDHB15 | protocadherin beta 15 | 2.08 | 0.001681771 | NB |
| RP11-94K8.1 | | 2.08 | 0.045295878 | NB |
| TMC2 | transmembrane channel-like 2 | 2.08 | 0.017138695 | NB |
| CTD-2514C3.1 | | 2.08 | 0.003430441 | NB |
| C3orf30 | | 2.07 | 0.034606296 | NB |
| KCTD16 | potassium channel tetramerization domain containing | 2.07 | 0.035336374 | NB |
| BACH1-IT1 | BACH1 intronic transcript 1 (non-protein coding) | 2.07 | 0.000671309 | NB |
| RP11-1114A5.4 | | 2.07 | 0.031092971 | NB |
| LEPR | leptin receptor | 2.06 | 0.013100955 | NB |
| PCDHB19P | protocadherin beta 19 pseudogene | 2.06 | 0.008917729 | NB |
| SPINK7 | serine peptidase inhibitor, Kazal type 7 (putative) | 2.06 | 0.021373132 | NB |
| LCTL | lactase-like | 2.06 | 0.049100171 | NB |
| AC011718.2 | | 2.06 | 0.016199164 | NB |
| ZCCHC12 | zinc finger, CCHC domain containing 12 | 2.06 | 0.004421152 | NB |
| RP11-1007J8.1 | | 2.05 | 0.030204228 | NB |
| S100G | S100 calcium binding protein G | 2.05 | 0.011590706 | NB |
| C3orf74 | | 2.04 | 0.018624954 | NB |
| NAALADL2 | N-acetylated alpha-linked acidic dipeptidase-like 2 | 2.04 | 0.042370292 | NB |
| SPRY1 | sprouty homolog 1, antagonist of FGF signaling (Droso [symbol] | 2.04 | 0.003839527 | NB |
| MIR550A2 | microRNA 550a-2 | 2.04 | 0.020508813 | NB |
| FAM55A | neurexophilin and PC-esterase domain family, member [symbol] | 2.04 | 0.04876748 | NB |
| SP6 | Sp6 transcription factor | 2.04 | 0.016408594 | NB |
| RP5-1068H6.3 | | 2.04 | 0.017824327 | NB |
| HMGN2P23 | high mobility group nucleosomal binding domain 2 pse [symbol] | 2.03 | 0.023511088 | NB |
| PLSCR4 | phospholipid scramblase 4 | 2.03 | 0.008070194 | NB |
| CTD-2292P10.4 | uncharacterized LOC100288181 | 2.03 | 0.04883796 | NB |
| AQP7P2 | aquaporin 7 pseudogene 2 | 2.03 | 0.047168612 | NB |
| IFLTD1 | | 2.03 | 0.038978796 | NB |
| RP11-423O2.1 | | 2.02 | 0.009084306 | NB |
| CCDC136 | coiled-coil domain containing 136 | 2.02 | 0.005329798 | NB |
| ATP2B1 | ATPase, Ca++ transporting, plasma membrane 1 | 2.02 | 0.003059735 | NB |
| ASIP | agouti signaling protein | 2.02 | 0.031092971 | NB |
| DPPA3P1 | developmental pluripotency associated 3 pseudogene [symbol] | 2.02 | 0.031391184 | NB |
| AC007563.1 | | 2.01 | 0.027988697 | NB |
| SEMA5A | sema domain, seven thrombospondin repeats (type 1 a [symbol] | 2.01 | 0.033656613 | NB |
| SCARNA15 | small Cajal body-specific RNA 15 | 2.01 | 0.033351877 | NB |
| TRHR | thyrotropin-releasing hormone receptor | 2.01 | 0.047168612 | NB |
| RPL7L1P12 | ribosomal protein 17-like 1 pseudogene 12 | 2.01 | 0.024790121 | NB |
| RP11-138H8.5 | | 2.01 | 0.039288394 | NB |
| DUSP15 | dual specificity phosphatase 15 | 2.01 | 0.045638568 | NB |
| ZNF75D | zinc finger protein 75D | 2.01 | 0.02643572 | NB |
| MIR211 | microRNA 211 | 654.53 | 0.003258841 | CB |
| TRGJP2 | T cell receptor gamma joining P2 | 98.51 | 0.018744092 | CB |
| IGHJ2 | immunoglobulin heavy joining 2 | 92.82 | 0.048733769 | CB |
| RP11-259G18.2 | | 69.31 | 0.039288394 | CB |
| TRBV7-7 | T cell receptor beta variable 7-7 | 57.74 | 0.00541274 | CB |
| IGKV6-21 | immunoglobulin kappa variable 6-21 (non-functional) | 49.85 | 0.037395217 | CB |
| IGHJ1 | immunoglobulin heavy joining 1 | 44.48 | 0.04073483 | CB |
| AC105247.1 | | 31.61 | 0.014702641 | CB |
| MIR513A2 | microRNA 513a-2 | 30.81 | 0.024507002 | CB |
| FAM69C | family with sequence similarity 69, member C | 28.52 | 0.028374775 | CB |
| ZBTB40-IT1 | ZBTB40 intronic transcript 1 (non-protein coding) | 28.24 | 0.029540253 | CB |
| TRBV5-7 | T cell receptor beta variable 5-7 (non-functional) | 27.78 | 0.011689051 | CB |
| TRPM1 | transient receptor potential cation channel, subfamily [symbol] | 25.45 | 0.003430441 | CB |
| TRBV6-9 | T cell receptor beta variable 6-9 | 25.33 | 0.036277389 | CB |
| IGHV3-11 | immunoglobulin heavy variable 3-11 (gene/pseudogen [symbol] | 24.99 | 0.006019354 | CB |
| RP1-128O3.5 | | 24.91 | 0.000845487 | CB |
| RP11-554D14.3 | | 24.51 | 0.043395953 | CB |
| MIR185 | microRNA 185 | 24.08 | 0.046543212 | CB |
| RP11-544M22.3 | | 23.4 | 0.006210424 | CB |
| RP11-120D12.2 | | 23.16 | 0.00346671 | CB |
| RP11-481A20.4 | | 22.91 | 0.023557449 | CB |
| IGKV3-11 | immunoglobulin kappa variable 3-11 | 22.63 | 0.019304276 | CB |
| IGHV1-2 | immunoglobulin heavy variable 1-2 | 22.09 | 0.012651023 | CB |
| TRBV11-1 | T cell receptor beta variable 11-1 | 21.8 | 0.035979007 | CB |
| RP11-118B22.1 | | 21.53 | 0.014367798 | CB |
| IGKV1-6 | immunoglobulin kappa variable 1-6 | 19.5 | 0.017656956 | CB |
| IGKV3D-11 | immunoglobulin kappa variable 3D-11 | 19.47 | 0.019058997 | CB |
| RP11-170L3.7 | | 18.78 | 0.028374775 | CB |
| IGHV3-23 | immunoglobulin heavy variable 3-23 | 17.5 | 0.02287369 | CB |
| IGKV1-12 | immunoglobulin kappa variable 1-12 | 16.37 | 0.033794271 | CB |
| IL21 | interleukin 21 | 16.05 | 0.024189646 | CB |
| IGHV1-24 | immunoglobulin heavy variable 1-24 | 15.87 | 0.001953399 | CB |
| IGHV2-70 | immunoglobulin heavy variable 2-70 | 15.8 | 0.001854517 | CB |
| RP11-118F2.3 | | 15.48 | 0.010626103 | CB |
| RPS3AP33 | ribosomal protein S3a pseudogene 33 | 15.32 | 0.012125647 | CB |
| TRBV7-3 | T cell receptor beta variable 7-3 | 15.2 | 0.013029879 | CB |
| CXorf1 | | 14.71 | 0.009648355 | CB |
| ADCY2 | adenylate cyclase 2 (brain) | 14.68 | 0.013827431 | CB |
| GPR25 | G protein-coupled receptor 25 | 14.14 | 0.035978626 | CB |
| RP4-673D20.5 | | 14.13 | 0.008612991 | CB |
| RPL36AP40 | ribosomal protein L36a pseudogene 40 | 13.94 | 0.047090742 | CB |
| RP11-215P8.1 | | 13.68 | 0.020435079 | CB |
| RP11-348B17.1 | | 13.68 | 0.008070194 | CB |
| RP4-738P11.4 | | 13.46 | 0.03745438 | CB |
| IGKV1D-12 | immunoglobulin kappa variable 1D-12 | 13.21 | 0.04213223 | CB |
| RP11-386I23.1 | | 13.2 | 0.002970807 | CB |
| IGKV4-1 | immunoglobulin kappa variable 4-1 | 12.83 | 0.021040385 | CB |
| IGLV1-40 | immunoglobulin lambda variable 1-40 | 12.37 | 0.045638568 | CB |
| GTSF1L | gametocyte specific factor 1-like | 12 | 0.017173685 | CB |
| IGKV1D-16 | immunoglobulin kappa variable 1D-16 | 11.57 | 0.031078338 | CB |
| IGHV4-28 | immunoglobulin heavy variable 4-28 | 11.31 | 0.048226887 | CB |
| GPR79 | G protein-coupled receptor 79, pseudogene | 11.3 | 0.033590863 | CB |
| IGLC6 | immunoglobulin lambda constant 6 [Kern + Oz− marker, [symbol] | 11.06 | 0.024790121 | CB |
| IGKV2-28 | immunoglobulin kappa variable 2-28 | 10.81 | 0.01377845 | CB |
| CTD-2201E18.1 | | 10.79 | 0.018497346 | CB |
| IGHV3-64 | immunoglobulin heavy variable 3-64 | 10.53 | 0.047995343 | CB |
| AC009892.10 | | 10.51 | 0.015181716 | CB |
| IGHG1 | immunoglobulin heavy constant gamma 1 (G1m marke [symbol] | 10.4 | 0.036386177 | CB |
| IGKV1-9 | immunoglobulin kappa variable 1-9 | 10.34 | 0.028975593 | CB |
| RP11-500G10.4 | | 10.13 | 0.021494609 | CB |
| IGKV2D-28 | immunoglobulin kappa variable 2D-28 | 10.05 | 0.019434049 | CB |
| RP11-281P11.1 | | 9.68 | 0.006912894 | CB |
| IGHV3-49 | immunoglobulin heavy variable 3-49 | 9.68 | 0.022638595 | CB |
| CKMT1A | creatine kinase, mitochondrial 1A | 9.65 | 0.036386177 | CB |
| RP11-166B2.5 | | 9.58 | 0.012166712 | CB |
| RP11-317B3.2 | | 9.54 | 0.046077602 | CB |
| IGHJ4 | immunoglobulin heavy joining 4 | 9.45 | 0.013184478 | CB |
| IGHGP | immunoglobulin heavy constant gamma P (non-functio [symbol] | 9.34 | 0.039288394 | CB |
| OR10G2 | olfactory receptor, family 10, subfamily 6, member 2 | 9.09 | 0.012125647 | CB |
| IGHE | immunoglobulin heavy constant epsilon | 8.83 | 0.027654311 | CB |
| BMS1P5 | BMS1 pseudogene 5 | 8.65 | 0.002970807 | CB |
| CST1 | cystatin SN | 8.61 | 0.034334741 | CB |
| IGHV1-69 | immunoglobulin heavy variable 1-69 | 8.58 | 0.036189278 | CB |
| RP11-534L6.3 | | 8.5 | 0.021641065 | CB |
| PPP1R14BP2 | protein phosphatase 1, regulatory (inhibitor) subunit 1 [symbol] | 8.44 | 0.033515231 | CB |
| IGLV1-51 | immunoglobulin lambda variable 1-51 | 8.42 | 0.046210752 | CB |
| GCNT1P3 | glucosaminyl (N-acetyl) transferase 1, core 2 pseudoge [symbol] | 8.28 | 0.049216823 | CB |
| RP11-151G12.2 | | 8.26 | 0.015181716 | CB |
| RP4-620F22.3 | | 7.94 | 0.041659897 | CB |
| CA14 | carbonic anhydrase XIV | 7.83 | 0.014371388 | CB |
| IGLV3-19 | immunoglobulin lambda variable 3-19 | 7.8 | 0.049633437 | CB |
| SHD | Src homology 2 domain containing transforming protei [symbol] | 7.73 | 0.013031872 | CB |
| RP11-2A7A.3 | | 7.58 | 0.028426013 | CB |
| IGHV4OR15-8 | immunoglobulin heavy variable 4/OR15-8 (non-functio [symbol] | 7.55 | 0.035978444 | CB |
| CKMT1B | creatine kinase, mitochondrial 1B | 7.53 | 0.045512017 | CB |
| IGKV1-5 | immunoglobulin kappa variable 1-5 | 7.45 | 0.022360081 | CB |
| RP11-115A14.1 | | 7.43 | 0.017845056 | CB |
| RP11-445O16.2 | | 7.18 | 0.020838997 | CB |
| SLITRK2 | SLIT and NTRK-like family, member 2 | 7.16 | 0.008070194 | CB |
| IGKJ5 | immunoglobulin kappa joining 5 | 7.09 | 0.02643572 | CB |
| CTD-2235H24.2 | | 7.08 | 0.030005872 | CB |
| IGKC | immunoglobulin kappa constant | 7.07 | 0.028688235 | CB |
| TTC24 | tetratricopeptide repeat domain 24 | 7 | 0.04883796 | CB |
| IGHG3 | immunoglobulin heavy constant gamma 3 (G3m marke [symbol] | 7 | 0.017221389 | CB |
| LRRC26 | leucine rich repeat containing 26 | 6.92 | 0.045085282 | CB |
| hsa-mir-220b | | 6.88 | 0.014969485 | CB |
| IGHJ3 | immunoglobulin heavy joining 3 | 6.85 | 0.020251381 | CB |
| AC007050.17 | | 6.83 | 0.040865625 | CB |
| RP11-33B1.3 | | 6.75 | 0.045085282 | CB |
| IGKV3D-20 | immunoglobulin kappa variable 3D-20 | 6.74 | 0.033794271 | CB |
| IGKJ5 | immunoglobulin kappa joining 5 | 6.69 | 0.036339918 | CB |
| CHIT1 | chitinase 1 (chitotriosidase) | 6.68 | 0.017221389 | CB |
| IGKJ1 | immunoglobulin kappa joining 1 | 6.65 | 0.02643572 | CB |
| CTD-2026G6.1 | | 6.65 | 0.013184478 | CB |
| AC005041.17 | | 6.57 | 0.039259375 | CB |
| IGLV7-43 | immunoglobulin lambda variable 7-43 | 6.54 | 0.02199666 | CB |
| ADCYAP1 | adenylate cyclase activating polypeptide 1 (pituitary) | 6.5 | 0.043523654 | CB |
| TRBV3-1 | T cell receptor beta variable 3-1 | 6.49 | 0.008690964 | CB |
| DUSP9 | dual specificity phosphatase 9 | 6.49 | 0.015687171 | CB |
| PHGR1 | proline/histidine/glycine-rich 1 | 6.48 | 0.009782763 | CB |
| TBL1Y | transducin (beta)-like 1, Y-linked | 6.42 | 0.03086908 | CB |
| IGLV3-1 | immunoglobulin lambda variable 3-1 | 6.33 | 0.024742224 | CB |
| IGKJ2 | immunoglobulin kappa joining 2 | 6.32 | 0.024814077 | CB |
| RP5-1198E17.1 | | 6.24 | 0.048733769 | CB |
| AC096579.13 | | 6.1 | 0.026864606 | CB |
| PAX5 | paired box 5 | 6.08 | 0.04488914 | CB |
| AL928742.12 | | 5.98 | 0.043395953 | CB |
| IGHM | immunoglobulin heavy constant mu | 5.97 | 0.049100171 | CB |
| DNM1P42 | DNM 1 pseudogene 38 | 5.97 | 0.01373806 | CB |
| CPNE7 | copine VII | 5.96 | 0.018812935 | CB |
| IGHG2 | immunoglobulin heavy constant gamma 2 (G2m marke [symbol] | 5.91 | 0.02643572 | CB |
| RP11-1280I22.1 | | 5.9 | 0.02678915 | CB |
| CCL18 | chemokine (C-C motif) ligand 18 (pulmonary and activa [symbol] | 5.87 | 0.02643572 | CB |
| IGKV3-20 | immunoglobulin kappa variable 3-20 | 5.84 | 0.031363566 | CB |
| RP11-1166P10.5 | | 5.83 | 0.020177433 | CB |
| RP11-17M16.1 | | 5.77 | 0.026146007 | CB |
| TRAV6 | T cell receptor alpha variable 6 | 5.73 | 0.027230317 | CB |
| IGJ | | 5.67 | 0.031092971 | CB |
| CD5L | CD5 molecule-like | 5.66 | 0.017111073 | CB |
| TRAV38-2DV8 | T cell receptor alpha variable 38-2/delta variable 8 | 5.64 | 0.017111073 | CB |
| TRAV1-1 | T cell receptor alpha variable 1-1 | 5.62 | 0.012652237 | CB |
| PAICSP3 | phosphoribosylaminoimidazole carboxylase, phosphori [symbol] | 5.61 | 0.022042996 | CB |
| RP11-367J7.3 | | 5.52 | 0.024542839 | CB |
| IGLC1 | immunoglobulin lambda constant 1 (Mcg marker) | 5.41 | 0.024328524 | CB |
| SLC12A3 | solute carrier family 12 (sodium/chloride transporter), [symbol] | 5.4 | 0.021083625 | CB |
| IGLL5 | immunoglobulin lambda-like polypeptide 5 | 5.37 | 0.022360081 | CB |
| TRBV11-2 | T cell receptor beta variable 11-2 | 5.35 | 0.019899858 | CB |
| CTB-193M12.3 | | 5.28 | 0.020059443 | CB |
| IGHV3-72 | immunoglobulin heavy variable 3-72 | 5.2 | 0.014711317 | CB |
| HS3ST2 | heparan sulfate (glucosamine) 3-O-sulfotransferase 2 | 5.19 | 0.015742933 | CB |
| FOXB1 | forkhead box B1 | 5.06 | 0.047375038 | CB |
| IGHV3-7 | immunoglobulin heavy variable 3-7 | 5.04 | 0.0422412 | CB |
| IGLJ1 | immunoglobulin lambda joining 1 | 5.02 | 0.027138346 | CB |
| SUSD5 | sushi domain containing 5 | 4.93 | 0.015742933 | CB |
| IRX2 | iroquois homeobox 2 | 4.91 | 0.045478051 | CB |
| TRAV12-1 | T cell receptor alpha variable 12-1 | 4.89 | 0.015921419 | CB |
| PTGDS | prostaglandin D2 synthase 21 kDa (brain) | 4.83 | 0.024328524 | CB |
| GOLGA7B | golgin A7 family, member B | 4.8 | 0.02052367 | CB |
| TCL1A | T-cell leukemia/lymphoma 1A | 4.8 | 0.047209651 | CB |
| RP11-731F5.2 | | 4.74 | 0.031092971 | CB |
| IGHV3-53 | immunoglobulin heavy variable 3-53 | 4.71 | 0.04213223 | CB |
| IGLV4-69 | immunoglobulin lambda variable 4-69 | 4.68 | 0.014251282 | CB |
| SIGLEC8 | sialic acid binding Ig-like lectin 8 | 4.66 | 0.003059735 | CB |
| IGHJ5 | immunoglobulin heavy joining 5 | 4.65 | 0.047474072 | CB |
| RP11-798M19.3 | | 4.63 | 0.032504427 | CB |
| RP11-615J4.4 | | 4.62 | 0.02875596 | CB |
| RP11-236F9.5 | | 4.62 | 0.012297912 | CB |
| FCRL3 | Fc receptor-like 3 | 4.59 | 0.018812935 | CB |
| TRAV8-3 | T cell receptor alpha variable 8-3 | 4.55 | 0.024375591 | CB |
| IL19 | interleukin 19 | 4.5 | 0.026302018 | CB |
| ZBP1 | Z-DNA binding protein 1 | 4.5 | 0.024814077 | CB |
| IGLV6-57 | immunoglobulin lambda variable 6-57 | 4.49 | 0.046776361 | CB |
| AL109761.5 | | 4.48 | 0.008747607 | CB |
| IGKV1-16 | immunoglobulin kappa variable 1-16 | 4.45 | 0.017656956 | CB |
| FCRL1 | Fc receptor-like 1 | 4.44 | 0.024742224 | CB |
| RP11-160A9.2 | | 4.43 | 0.006059865 | CB |
| RP11-96D1.5 | | 4.43 | 0.039680708 | CB |
| TUBB4A | tubulin, beta 4A class IVa | 4.42 | 0.02643572 | CB |
| IGHA1 | immunoglobulin heavy constant alpha 1 | 4.41 | 0.024328524 | CB |
| RP11-46D6.1 | | 4.38 | 0.024728355 | CB |
| FAM159A | family with sequence similarity 159, member A | 4.33 | 0.045512017 | CB |
| CD79A | CD79a molecule, immunoglobulin-associated alpha | 4.33 | 0.02643572 | CB |
| XXbac-B476C20.10 | | 4.33 | 0.00890364 | CB |
| AC013444.1 | | 4.32 | 0.009968933 | CB |
| CTD-3193O13.2 | | 4.29 | 0.035096859 | CB |
| IGHJ6 | immunoglobulin heavy joining 6 | 4.26 | 0.015703623 | CB |
| NSG1 | neuron specific gene family member 1 | 4.25 | 0.045638568 | CB |
| UGT2B17 | UDP glucuronosyltransferase 2 family, polypeptide B17 | 4.21 | 0.039234101 | CB |
| RUNX3 | runt-related transcription factor 3 | 4.2 | 0.003059735 | CB |
| MS4A1 | membrane-spanning 4-domains, subfamily A, member [symbol] | 4.2 | 0.042370292 | CB |
| TRBV7-8 | T cell receptor beta variable 7-8 | 4.15 | 0.003333637 | CB |
| C5orf38 | | 4.11 | 0.038479039 | CB |
| AC098850.4 | | 4.11 | 0.049100171 | CB |
| CD52 | CD52 molecule | 4.1 | 0.036386177 | CB |
| TRBV19 | T cell receptor beta variable 19 | 4.1 | 0.014762458 | CB |
| RP11-752G15.3 | | 4.09 | 0.007736506 | CB |
| ADAMDEC1 | ADAM-like, decysin 1 | 4.04 | 0.026864606 | CB |
| HM13-IT1 | HM13 intronic transcript 1 (non-protein coding) | 4.02 | 0.008747607 | CB |
| FAIM3 | Fas apoptotic inhibitory molecule 3 | 4 | 0.001257413 | CB |
| TRAV8-2 | T cell receptor alpha variable 8-2 | 3.98 | 0.018415671 | CB |
| IGHD | immunoglobulin heavy constant delta | 3.97 | 0.019304276 | CB |
| CDH3 | cadherin 3, type 1, P-cadherin (placental) | 3.96 | 0.031092971 | CB |
| IGKV1D-13 | immunoglobulin kappa variable 1D-13 | 3.93 | 0.041968771 | CB |
| TRBV6-5 | T cell receptor beta variable 6-5 | 3.92 | 0.022828147 | CB |
| GAPDHP66 | glyceraldehyde-3-phosphate dehydrogenase pseudoge [symbol] | 3.91 | 0.028010999 | CB |
| AC110615.1 | | 3.9 | 0.015372603 | CB |
| TRAV12-2 | T cell receptor alpha variable 12-2 | 3.89 | 0.008789839 | CB |
| 3-Sep | septin 3 | 3.89 | 0.028688235 | CB |
| RP11-444D3.1 | | 3.83 | 0.026538797 | CB |
| IL12A | interleukin 12A (natural killer cell stimulatory factor 1, [symbol] | 3.8 | 0.000890132 | CB |
| RP11-166B2.3 | | 3.8 | 0.016120921 | CB |
| POU2AF1 | POU class 2 associating factor 1 | 3.74 | 0.02287369 | CB |
| AL137072.1 | | 3.72 | 0.040458113 | CB |
| RP11-197M22.2 | | 3.72 | 0.003591886 | CB |
| RP11-304L20.1 | | 3.69 | 0.042281808 | CB |
| KLHDC7B | kelch domain containing 7B | 3.69 | 0.042370292 | CB |
| RP11-553K8.3 | | 3.64 | 0.007203049 | CB |
| FCRL2 | Fc receptor-like 2 | 3.62 | 0.033852011 | CB |
| IGKV3-15 | immunoglobulin kappa variable 3-15 | 3.61 | 0.042339272 | CB |
| PLA2G2D | phospholipase A2, group IID | 3.59 | 0.011547361 | CB |
| TRBV20-1 | T cell receptor beta variable 20-1 | 3.58 | 0.01262029 | CB |
| TRDV1 | T cell receptor delta variable 1 | 3.58 | 0.044163971 | CB |
| IL24 | interleukin 24 | 3.54 | 0.002180177 | CB |
| RASSF6 | Ras association (RalGDS/AF-6) domain family member [symbol] | 3.52 | 0.034369721 | CB |
| RP3-323N1.2 | | 3.5 | 0.006129994 | CB |
| TRAV2 | T cell receptor alpha variable 2 | 3.5 | 0.012569126 | CB |
| ZNF831 | zinc finger protein 831 | 3.5 | 0.029054717 | CB |
| AC004906.3 | | 3.48 | 0.033880884 | CB |
| Z97634.5 | | 3.44 | 0.020435079 | CB |
| USP43 | ubiquitin specific peptidase 43 | 3.42 | 0.036189278 | CB |
| IGHV1-3 | immunoglobulin heavy variable 1-3 | 3.41 | 0.004030313 | CB |
| KCNIP3 | Kv channel interacting protein 3, calsenilin | 3.38 | 0.003059735 | CB |
| CUX2 | cut-like homeobox 2 | 3.37 | 0.022828147 | CB |
| AC013264.2 | | 3.36 | 0.025869773 | CB |
| ICOS | inducible T-cell co-stimulator | 3.36 | 0.02683945 | CB |
| TRBV29-1 | T cell receptor beta variable 29-1 | 3.36 | 0.028975593 | CB |
| RP11-351I21.6 | | 3.36 | 0.02643572 | CB |
| WNT10A | wingless-type MMTV integration site family, member 1 [symbol] | 3.35 | 0.039148946 | CB |
| FCRLA | Fc receptor-like A | 3.34 | 0.033656613 | CB |
| TIGIT | T cell immunoreceptor with Ig and ITIM domains | 3.33 | 0.033656613 | CB |
| AC009499.1 | | 3.32 | 0.03076835 | CB |
| TRBV4-1 | T cell receptor beta variable 4-1 | 3.28 | 0.041968771 | CB |
| HLA-DQA1 | major histocompatiblity complex, class II, DQ alpha 1 | 3.26 | 0.033656613 | CB |
| DNTT | DNA nucleotidylexotransferase | 3.25 | 0.016753819 | CB |
| GNG4 | guanine nucleotide binding protein (G protein), gamma [symbol] | 3.24 | 0.029028339 | CB |
| RP11-641C17.4 | | 3.23 | 0.016475123 | CB |
| CD72 | CD72 molecule | 3.23 | 0.018812935 | CB |
| ST8SIA6 | ST8 alpha-N-acetyl-neuraminide alpha-2,8-siafyltransfe [symbol] | 3.23 | 0.042370292 | CB |
| KIAA0125 | KIAA0125 | 3.23 | 0.033698056 | CB |
| PTCRA | pre T-cell antigen receptor alpha | 3.22 | 0.026404029 | CB |
| UBASH3A | ubiquitin associated and SH3 domain containing A | 3.22 | 0.016408594 | CB |
| PYHIN1 | pyrin and HIN domain family, member 1 | 3.19 | 0.011925792 | CB |
| EOMES | eomesodermin | 3.19 | 0.001902564 | CB |
| CD6 | CD6 molecule | 3.18 | 0.011925792 | CB |
| RP11-74K11.1 | | 3.18 | 0.04213223 | CB |
| LILRA4 | leukocyte immunoglobulin-like receptor, subfamily A ( [symbol] | 3.18 | 0.015742933 | CB |
| CD3G | CD3g molecule, gamma (CD3-TCR complex) | 3.17 | 0.010595239 | CB |
| TRAV3 | T cell receptor alpha variable 3 (gene/pseudogene) | 3.17 | 0.04488914 | CB |
| OR6S1 | olfactory receptor, family 6, subfamily S, member 1 | 3.16 | 0.033574388 | CB |
| IGKV3D-15 | immunoglobulin kappa variable 3D-15 (gene/pseudoge [symbol] | 3.15 | 0.02683945 | CB |
| S1PR4 | sphingosine-1-phosphate receptor 4 | 3.14 | 0.04883796 | CB |
| MNX1 | motor neuron and pancreas homeobox 1 | 3.12 | 0.037825665 | CB |
| LY9 | lymphocyte antigen 9 | 3.1 | 0.021105252 | CB |
| RP11-481A20.10 | | 3.08 | 0.023509294 | CB |
| RP11-80A15.1 | | 3.08 | 0.01692508 | CB |
| RP1-127D3.4 | | 3.06 | 0.012666399 | CB |
| RP11-290F20.3 | | 3.06 | 0.011925792 | CB |
| AL139819.1 | | 3.05 | 0.013811098 | CB |
| ACTL8 | actin-like 8 | 3.04 | 0.0100951 | CB |
| ZBED2 | zinc finger, BED-type containing 2 | 3.03 | 0.004030313 | CB |
| ITK | IL2-inducible T-cell kinase | 3.03 | 0.049100171 | CB |
| TRAV1-2 | T cell receptor alpha variable 1-2 | 3.02 | 0.009442924 | CB |
| SLAMF6 | SLAM family member 6 | 3.01 | 0.010840451 | CB |
| RPSAP53 | ribosomal protein SA pseudogene 53 | 3.01 | 0.028688235 | CB |
| RP11-481A20.11 | | 2.99 | 0.009241778 | CB |
| IDO1 | indoleamine 2,3-dioxygenase 1 | 2.99 | 0.021105252 | CB |
| RP11-195C7.3 | | 2.98 | 0.029602879 | CB |
| HSH2D | hematopoietic SH2 domain containing | 2.98 | 0.028975593 | CB |
| AC002306.1 | | 2.97 | 0.021494609 | CB |
| RP11-379H8.1 | | 2.96 | 0.036500639 | CB |
| CRYM | crystallin, mu | 2.96 | 0.045478051 | CB |
| CXorf57 | | 2.96 | 0.017221389 | CB |
| KRT27 | keratin 27 | 2.95 | 0.011193228 | CB |
| SNRPFP1 | small nuclear ribonucleoprotein polypeptide F pseudog [symbol] | 2.95 | 0.047209651 | CB |
| IGLV2-11 | immunoglobulin lambda variable 2-11 | 2.95 | 0.028975593 | CB |
| RP11-293F5.4 | | 2.9 | 0.030369085 | CB |
| SPOCK2 | sparc/osteonectin, cwcv and kazal-like domains proteo [symbol] | 2.9 | 0.028688235 | CB |
| C11orf41 | | 2.9 | 0.02052367 | CB |
| CD7 | CD7 molecule | 2.9 | 0.036386177 | CB |
| FSD1 | fibronectin type III and SPRY domain containing 1 | 2.9 | 0.031391184 | CB |
| TMEM191A | transmembrane protein 191A (pseudogene) | 2.9 | 0.026864606 | CB |
| RP11-292F22.3 | | 2.89 | 0.032737245 | CB |
| RAB19 | RAB19, member RAS oncogene family | 2.88 | 0.033351877 | CB |
| PRF1 | perforin 1 (pore forming protein) | 2.88 | 0.015742933 | CB |
| RP11-332O19.3 | | 2.85 | 0.007014254 | CB |
| CTC-422A18.2 | | 2.84 | 0.040365068 | CB |
| NR4A3 | nuclear receptor subfamily 4, group A, member 3 | 2.84 | 0.004785714 | CB |
| CD3D | CD3d molecule, delta (CD3-TCR complex) | 2.84 | 0.014371388 | CB |
| SCML1 | sex comb on midleg-like 1 (Drosophila) | 2.84 | 0.031092971 | CB |
| THEMIS | thymocyte selection associated | 2.83 | 0.045478051 | CB |
| HSD11B1 | hydroxysteroid (11-beta) dehydrogenase 1 | 2.81 | 0.028688235 | CB |
| IL28RA | interferon, lambda receptor 1 | 2.8 | 0.010595239 | CB |
| GNLY | granulysin | 2.8 | 0.014371388 | CB |
| RP11-429J17.6 | | 2.8 | 0.014371388 | CB |
| LCK | lymphocyte-specific protein tyrosine kinase | 2.79 | 0.015079112 | CB |
| RPL5P32 | ribosomal protein L5 pseudogene 32 | 2.78 | 0.019540488 | CB |
| AC023490.1 | | 2.78 | 0.013100955 | CB |
| RP11-564A8.4 | | 2.77 | 0.000583885 | CB |
| RP11-220D10.1 | | 2.77 | 0.017559073 | CB |
| TNFRSF11B | tumor necrosis factor receptor superfamily, member 1 [symbol] | 2.75 | 0.042339272 | CB |
| ATP1A3 | ATPase, Na+/K+ transporting, alpha 3 polypeptide | 2.73 | 0.024328524 | CB |
| IKZF3 | IKAROS family zinc finger 3 (Aiolos) | 2.72 | 0.014371388 | CB |
| C16orf54 | | 2.7 | 0.029054717 | CB |
| AC008984.2 | | 2.7 | 0.004072591 | CB |
| CXCL13 | chemokine (C-X-C motif) ligand 13 | 2.69 | 0.019434049 | CB |
| RP11-599J14.2 | | 2.67 | 0.039288394 | CB |
| TRAV5 | T cell receptor alpha variable 5 | 2.67 | 0.033575171 | CB |
| RP11-566K11.2 | | 2.67 | 0.035185369 | CB |
| CD96 | CD96 molecule | 2.66 | 0.042339272 | CB |
| C8orf80 | | 2.66 | 0.036500639 | CB |
| TNFRSF13B | tumor necrosis factor receptor super-family, member 1 [symbol] | 2.65 | 0.04352477 | CB |
| TRAV13-1 | T cell receptor alpha variable 13-1 | 2.64 | 0.024662434 | CB |
| EIF4BP9 | eukaryotic translation initiation factor 48 pseudogene [symbol] | 2.64 | 0.007991506 | CB |
| PTPRCAP | protein tyrosine phosphatase, receptor type, C-associa [symbol] | 2.62 | 0.02052367 | CB |
| SLC24A4 | solute carrier family 24 (sodium/potassium/calcium ex [symbol] | 2.62 | 0.028688235 | CB |
| GZMH | granzyme H (cathepsin G-like 2, protein h-CCPX) | 2.61 | 0.045512017 | CB |
| TBX21 | T-box 21 | 2.61 | 0.021040385 | CB |
| SLC22A18AS | solute carrier family 22 (organic cation transporter), m [symbol] | 2.59 | 0.036530778 | CB |
| LINC00426 | long intergenic non-protein coding RNA 426 | 2.59 | 0.009381276 | CB |
| HSBP1L1 | heat shock factor binding protein 1-like 1 | 2.58 | 0.001681771 | CB |
| TRAC | T cell receptor alpha constant | 2.57 | 0.013100955 | CB |
| MTFP1 | mitochondrial fission process 1 | 2.57 | 0.00657893 | CB |
| 1-Sep | septin 1 | 2.55 | 0.039288394 | CB |
| IL6R | interleukin 6 receptor | 2.54 | 0.049100171 | CB |
| RP11-61I13.2 | | 2.54 | 0.017952081 | CB |
| CATSPERB | catsper channel auxiliary subunit beta | 2.53 | 0.022360081 | CB |
| LAG3 | lymphocyte-activation gene 3 | 2.52 | 0.028688235 | CB |
| LTB | lymphotoxin beta (TNF superfamily, member 3) | 2.51 | 0.036386177 | CB |
| GZMB | granzyme B (granzyme 2, cytotoxic T-lymphocyte-asso [symbol] | 2.51 | 0.026688235 | CB |
| TRBV4-2 | T cell receptor beta variable 4-2 | 2.49 | 0.048226887 | CB |
| C14orf182 | | 2.49 | 0.009675088 | CB |
| HS3ST3B1 | heparan sulfate (glucosamine) 3-O-sulfotransferase 3B [symbol] | 2.49 | 0.045512017 | CB |
| CTD-2562J17.3 | | 2.48 | 0.002755485 | CB |
| RP11-630I5.1 | | 2.46 | 0.047209651 | CB |
| BEND4 | BEN domain containing 4 | 2.46 | 0.003304376 | CB |
| IL12RB1 | interleukin 12 receptor, beta 1 | 2.45 | 0.045638568 | CB |
| KLHL6 | kelch-like family member 6 | 2.44 | 0.049100171 | CB |
| RP11-126K1.8 | | 2.43 | 0.021734161 | CB |
| PARP15 | poly (ADP-ribose) polymerase family, member 15 | 2.43 | 0.02643572 | CB |
| RP13-554M15.6 | | 2.43 | 0.020709572 | CB |
| TMEM238 | transmembrane protein 238 | 2.43 | 0.011925792 | CB |
| AC104698.1 | | 2.41 | 0.026170063 | CB |
| FASLG | Fas ligand (TNF superfamily, member 6) | 2.4 | 0.028975593 | CB |
| GYLTL1B | glycosyltransferase-like 1B | 2.39 | 0.029054717 | CB |
| IL29 | interferon, lambda 1 | 2.38 | 0.030404894 | CB |
| GZMK | granzyme K (granzyme 3; tryptase ▮) | 2.37 | 0.024742224 | CB |
| FHOD3 | formin homology 2 domain containing 3 | 2.37 | 0.042370292 | CB |
| PRUNE2 | prune homolog 2 (Drosophila) | 2.36 | 0.042370292 | CB |
| FXYD5 | FXYD domain containing ion transport regulator 5 | 2.35 | 0.002724323 | CB |
| CTLA4 | cytotoxic T-lymphocyte-associated protein 4 | 2.34 | 0.024814077 | CB |
| ATP13A4-AS1 | ATP13A4 antisense RNA 1 | 2.34 | 0.015249492 | CB |
| RP11-44K6.4 | | 2.34 | 0.036500639 | CB |
| PFKP | phosphofructokinase, platelet | 2.34 | 0.011925792 | CB |
| TRAV8-4 | T cell receptor alpha variable 8-4 | 2.34 | 0.02857165 | CB |
| RP11-1094M14.3 | | 2.34 | 0.049100171 | CB |
| ZMYND12 | zinc finger, MYND-type containing 12 | 2.33 | 0.024328524 | CB |
| TRBC2 | T cell receptor beta constant 2 | 2.33 | 0.011925792 | CB |
| RP11-1396O13.20 | | 2.32 | 0.024328524 | CB |
| TRBV5-5 | T cell receptor beta variable 5-5 | 2.32 | 0.049758592 | CB |
| TRAT1 | T cell receptor associated transmembrane adaptor 1 | 2.31 | 0.045478051 | CB |
| CHAC1 | ChaC, cation transport regulator homolog 1 (E. coli) | 2.31 | 0.011925792 | CB |
| SLC1A4 | solute carrier famiy 1 (glutamate/neutral amino acid t [symbol] | 2.3 | 0.013100955 | CB |
| RPS3AP34 | ribosomal protein S3a pseudogene 34 | 2.3 | 0.018812935 | CB |
| RP11-982M15.6 | | 2.3 | 0.036386177 | CB |
| JAKMIP1 | jan us kinase and microtubule interacting protein 1 | 2.29 | 0.033852011 | CB |
| CPEB1 | cytoplasmic polyadenylation element binding protein 1 | 2.29 | 0.039288394 | CB |
| AC104820.2 | | 2.28 | 0.002764257 | CB |
| KCNMA1 | potassium large conductance calcium-activated channe | 2.28 | 0.022360081 | CB |
| RP11-93B14.6 | | 2.28 | 0.022437406 | CB |
| NCF1B | neutrophil cytosolic factor 1B pseudogene | 2.27 | 0.049100171 | CB |
| HLF | hepatic leukemia factor | 2.27 | 0.049100171 | CB |
| RPS6KA1 | ribosomal protein S6 kinase, 90 kDa, polypeptide 1 | 2.26 | 0.013100955 | CB |
| RP13-735L24.1 | | 2.26 | 0.03877208 | CB |
| TMEM108 | transmembrane protein 108 | 2.25 | 0.045638568 | CB |
| RP11-982M15.8 | | 2.25 | 0.049369302 | CB |
| IGFLR1 | IGF-like family receptor 1 | 2.24 | 0.036386177 | CB |
| TNIP3 | TNIFAIP3 interacting protein 3 | 2.23 | 0.031391184 | CB |
| RP11-443A13.3 | | 2.23 | 0.015742933 | CB |
| TRGV7 | T cell receptor gamma variable 7 (pseudogene) | 2.22 | 0.011590706 | CB |
| OIT3 | ancoprotein induced transcript 3 | 2.22 | 0.036500639 | CB |
| SLA2 | Src-like-adaptor 2 | 2.22 | 0.018812935 | CB |
| ZNF683 | zinc finger protein 683 | 2.21 | 0.045478051 | CB |
| SAMD5 | sterile alpha motif domain containing 5 | 2.21 | 0.029054717 | CB |
| GPR174 | G protein-coupled receptor 174 | 2.21 | 0.031391184 | CB |
| SASH3 | SAM and SH3 domain containing 3 | 2.21 | 0.022360081 | CB |
| LAX1 | lymphocyte transmembrane adaptor 1 | 2.2 | 0.033656613 | CB |
| KCNAB2 | potassium voltage-gated channel, shaker related subfa [symbol] | 2.19 | 0.003430441 | CB |
| HIST1H2BG | histone cluster 1, H2bg | 2.19 | 0.039288394 | CB |
| BIK | BCL2-interacting killer (apoptosis-inducing) | 2.19 | 0.015079112 | CB |
| CD2 | CD2 molecule | 2.18 | 0.033656613 | CB |
| RP11-10G12.1 | | 2.17 | 0.008391308 | CB |
| FTH1P24 | ferritin, heavy polypeptide 1 pseudogene 24 | 2.17 | 0.041434796 | CB |
| PLP2 | proteolipid protein 2 (colonic epithelium-enriched) | 2.17 | 0.003839527 | CB |
| SLC34A1 | solute carrier family 34 (type II sodium/phosphate cont [symbol] | 2.16 | 0.041434796 | CB |
| RP11-771F20.1 | | 2.16 | 0.031092971 | CB |
| IFITM5 | interferon induced transmembrane protein 5 | 2.15 | 0.036189278 | CB |
| RP11-390B4.3 | | 2.13 | 0.004290131 | CB |
| CXCR3 | chemokine (C-X-C motif) receptor 3 | 2.13 | 0.039288394 | CB |
| TRGC1 | T cell receptor gamma constant 1 | 2.12 | 0.039316473 | CB |
| CD3E | CD3e molecule, epsilon (CD3-TCR complex) | 2.12 | 0.012666399 | CB |
| SIT1 | signaling threshold regulating transmembrane adaptor | 2.11 | 0.033852011 | CB |
| NKG7 | natural killer cell granule protein 7 | 2.11 | 0.024328524 | CB |
| C1orf51 | | 2.1 | 0.028588235 | CB |
| ABCD2 | ATP binding cassette, sub-family D (ALD), member 2 | 2.1 | 0.028688235 | CB |
| TNIK | TRAF2 and NCK interacting kinase | 2.09 | 0.045638568 | CB |
| DNAJC6 | DnaJ (Hsp40) homolog, subfamily C, member 6 | 2.08 | 0.036386177 | CB |
| SLCO4A1 | solute carrier organic anion transporter family, membe [symbol] | 2.08 | 0.031092971 | CB |
| HSD3B7 | hydroxy-delta-5-steroid dehydrogenase, 3 beta- and st [symbol] | 2.07 | 0.004290131 | CB |
| CR2 | complement component (3d/Epstein Barr virus) recept [symbol] | 2.06 | 0.042339272 | CB |
| TC2N | tandem C2 domains, nuclear | 2.06 | 0.045638568 | CB |
| IL12RB2 | interleukin 12 receptor, beta 2 | 2.05 | 0.028688235 | CB |
| RGS14 | regulator of G-protein signaling 14 | 2.05 | 0.005329798 | CB |
| CLEC19A | C-type lectin domain family 19, member A | 2.04 | 0.041659897 | CB |
| MYO1G | myosin IG | 2.03 | 0.049100171 | CB |
| RHBDL1 | rhomboid, veinlet-like 1 (Drosophia) | 2.03 | 0.024328524 | CB |
| CD19 | CD19 molecule | 2.03 | 0.028688235 | CB |
| TJP3 | tight junction protein 3 | 2.03 | 0.021083625 | CB |
| PIK3CD | phosphatidylinositol-4,5-bisphosphate 3-kinase, catalyt [symbol] | 2.02 | 0.022360081 | CB |
| DHRS9 | dehydrogenase/reductase (SDR family) member 9 | 2.02 | 0.008917729 | CB |
| RP3-453I5.2 | | 2.02 | 0.031835936 | CB |
| ITGAL | integrin, alpha L (antigen CD11A (p180), lymphocyte fu [symbol] | 2.02 | 0.024328524 | CB |
| NLRC5 | NLR family, CARD domain containing 5 | 2.02 | 0.009839457 | CB |
| LPIN3 | lipin 3 | 2.02 | 0.036386177 | CB |
| NLGN4Y | neuroligin 4, Y-linked | 2.02 | 0.036386177 | CB |
| DTHD1 | death domain containing 1 | 2.01 | 0.039347886 | CB |
| RP11-351I21.7 | | 2.01 | 0.033656613 | CB |
| FOXH1 | forkhead box H1 | 2.01 | 0.038385003 | CB |
| ZNF296 | zinc finger protein 296 | 2.01 | 0.039288394 | CB |

[symbol]

indicates data missing or illegible when filed

TABLE 3
Genes enriched in TCGA Xq28-CGA-high/low expression samples

| Gene | Gene_Name | Fold_Change | P-value | Group |
|---|---|---|---|---|
| ?\|100133144 | | 2.57 | 4.18E−06 | Xq28-CGA high |
| ?\|100134869 | | 2.59 | 7.35E−09 | Xq28-CGA high |
| ?\|340602 | | 2.1 | 2.38E−05 | Xq28-CGA high |
| ?\|391343 | | 3.38 | 2.94E−15 | Xq28-CGA high |
| AACSL\|729522 | acetoacetyl-CoA synthetase pseudogene 1 | 5.79 | 1.38E−14 | Xq28-CGA high |
| ABCA8\|10351 | ATP-binding cassette, sub-family A (ABC1), mem [symbol] | 11.7 | 2.59E−05 | Xq28-CGA high |
| ABHD1\|84696 | abhydrolase domain containing 1 | 2.2 | 9.03E−07 | Xq28-CGA high |
| ACCN4\|55515 | acid-sensing (proton-gated) ion channel family m [symbol] | 2.68 | 3.92E−05 | Xq28-CGA high |
| ACOT11\|26027 | acyl-CoA thioesterase 11 | 2.01 | 9.52E−07 | Xq28-CGA high |
| ACSM3\|6296 | acyl-CoA synthetase medium-chain family memb [symbol] | 2.11 | 1.45E−04 | Xq28-CGA high |
| ADAM21P1\|145241 | ADAM metallopeptidase domain 21 pseudogene [symbol] | 2.04 | 1.45E−06 | Xq28-CGA high |
| ADAM21\|8747 | ADAM metallopeptidase domain 21 | 2.16 | 7.13E−05 | Xq28-CGA high |
| ADAMTS20\|80070 | ADAM metallopeptidase with thrombospondin t [symbol] | 8.83 | 5.40E−18 | Xq28-CGA high |
| ADAMTS3\|9508 | ADAM metallopeptidase with thrombospondin t [symbol] | 3.28 | 8.96E−05 | Xq28-CGA high |
| AGBL4\|84871 | ATP/GTP binding protein-like 4 | 2.86 | 5.45E−07 | Xq28-CGA high |
| AKAP6\|9472 | A kinase (PRKA) anchor protein 6 | 5.2 | 1.25E−09 | Xq28-CGA high |
| ALDH1L1\|10840 | aldehyde dehydrogenase 1 family, member L1 | 4.51 | 1.49E−05 | Xq28-CGA high |
| ALDH8A1\|64577 | aldehyde dehydrogenase 8 family, member A1 | 2.29 | 8.54E−09 | Xq28-CGA high |
| ANGPT1\|284 | angiopoietin 1 | 16.65 | 7.33E−21 | Xq28-CGA high |
| ANKFN1\|162282 | ankyrin-repeat and fibronectin type III domain c [symbol] | 3.97 | 2.53E−06 | Xq28-CGA high |
| ANKRD20A3\|441425 | ankyrin repeat domain 20 family, member A3 | 2.03 | 2.97E−05 | Xq28-CGA high |
| ANKRD20A4\|728747 | ankyrin repeat domain 20 family, member A4 | 2.02 | 4.49E−05 | Xq28-CGA high |
| ANKRD20B\|729171 | ankyrin repeat domain 20 family, member A8, p [symbol] | 3.12 | 1.46E−13 | Xq28-CGA high |
| ANKRD43\|134548 | ankyrin repeat domain family member A | 2.23 | 6.52E−07 | Xq28-CGA high |
| ANKRD45\|339416 | ankyrin repeat domain 45 | 8.13 | 7.90E−12 | Xq28-CGA high |
| ANKRD7\|56311 | ankyrin repeat domain 7 | 2.62 | 2.73E−06 | Xq28-CGA high |
| ANO3\|63982 | anoctamin 3 | 10.84 | 3.30E−15 | Xq28-CGA high |
| ANO4\|121601 | anoctamin 4 | 6.62 | 7.25E−07 | Xq28-CGA high |
| ANO5\|203859 | anoctamin 5 | 6.36 | 6.54E−05 | Xq28-CGA high |
| ARHGEF35\|445328 | Rho guanine nucleotide exchange factor (GEF) 3 [symbol] | 3.74 | 5.02E−07 | Xq28-CGA high |
| ARHGEF5\|7984 | Rho guanine nucleotide exchange factor (GEF) 5 | 2.61 | 1.31E−04 | Xq28-CGA high |
| ART3\|419 | ADP-ribosyltransferase 3 | 3.07 | 1.68E−05 | Xq28-CGA high |
| ASB4\|51666 | ankyrin repeat and SOCS box containing 4 | 9.37 | 2.34E−10 | Xq28-CGA high |
| ASCL1\|429 | achaete-scute family bHLH transcription factor 1 [symbol] | 6.46 | 3.94E−10 | Xq28-CGA high |
| ATP1B1\|481 | ATPase, Na+/K+ transporting, beta 1 polypeptide [symbol] | 2.33 | 2.89E−06 | Xq28-CGA high |
| ATP1B2\|482 | ATPase, Na+/K+ transporting, beta 2 polypeptide [symbol] | 6.39 | 4.48E−07 | Xq28-CGA high |
| AURKAPS1\|6791 | aurora kinase A pseudogene 1 | 2.27 | 9.37E−18 | Xq28-CGA high |
| AZGP1\|563 | alpha-2-glycoprotein 1, zinc-binding | 3.89 | 2.93E−09 | Xq28-CGA high |
| B3GALNT1\|8706 | beta-1,3-N-acetylgalactosaminyltransferase 1 (g [symbol] | 3.07 | 9.52E−07 | Xq28-CGA high |
| BAAT\|570 | bile acid CoA: amino add N-acyltransferase (glyc [symbol] | 4.88 | 1.10E−04 | Xq28-CGA high |
| BAGE2\|85319 | B melanoma antigen family, member 2 | 6.61 | 6.56E−19 | Xq28-CGA high |
| BAGE\|574 | B melanoma antigen | 322.69 | 8.19E−30 | Xq28-CGA high |
| BDKRB1\|623 | bradykinin receptor B1 | 2.02 | 4.21E−06 | Xq28-CGA high |
| C10orf62\|414157 | | 2.32 | 1.91E−07 | Xq28-CGA high |
| C11orf9\|745 | | 3.02 | 7.92E−07 | Xq28-CGA high |
| C12orf56\|115749 | | 12.21 | 2.93E−08 | Xq28-CGA high |
| C17orf47\|284083 | | 2.01 | 5.46E−06 | Xq28-CGA high |
| C17orf57\|124989 | | 2.69 | 1.88E−09 | Xq28-CGA high |
| C18orf2\|56651 | | 135.15 | 1.52E−22 | Xq28-CGA high |
| C1QTNF3\|114899 | C1q and tumor necrosis factor related protein 3 | 3.69 | 6.53E−06 | Xq28-CGA high |
| C1orf114\|57821 | | 9.23 | 8.34E−11 | Xq28-CGA high |
| C1orf175\|374977 | | 2.41 | 4.24E−06 | Xq28-CGA high |
| C1orf88\|128344 | | 2.19 | 5.98E−05 | Xq28-CGA high |
| C21orf29\|54084 | | 2.29 | 2.18E−07 | Xq28-CGA high |
| C21orf90\|114043 | | 10.16 | 2.71E−11 | Xq28-CGA high |
| C22orf34\|348645 | | 6.07 | 2.01E−12 | Xq28-CGA high |
| C2orf61\|285051 | | 2.72 | 3.12E−05 | Xq28-CGA high |
| C2orf66\|401027 | | 3.05 | 2.73E−07 | Xq28-CGA high |
| C3orf20\|84077 | | 2.16 | 5.04E−05 | Xq28-CGA high |
| C3orf30\|152405 | | 6.01 | 1.77E−13 | Xq28-CGA high |
| C3orf50\|93556 | | 7.19 | 1.32E−04 | Xq28-CGA high |
| C3orf66\|677779 | | 10.47 | 7.19E−07 | Xq28-CGA high |
| C4orf19\|55286 | | 4.83 | 1.11E−07 | Xq28-CGA high |
| C4orf37\|285555 | | 2.87 | 1.39E−04 | Xq28-CGA high |
| C4orf6\|10141 | | 3.81 | 3.52E−05 | Xq28-CGA high |
| C5orf58\|133874 | | 3.33 | 4.42E−07 | Xq28-CGA high |
| C6orf164\|63914 | | 2.09 | 4.98E−06 | Xq28-CGA high |
| C7orf51\|222950 | | 2.06 | 9.21E−06 | Xq28-CGA high |
| C7orf71\|285941 | | 2.42 | 5.51E−05 | Xq28-CGA high |
| C8orf85\|441376 | | 4.73 | 2.02E−07 | Xq28-CGA high |
| CA6\|765 | carbonic anhydrase VI | 8.97 | 7.57E−05 | Xq28-CGA high |
| CABP4\|57010 | calcium tending protein 4 | 2.09 | 2.10E−05 | Xq28-CGA high |
| CABYR\|26256 | calcium binding tyrosine-(Y)-phosphorylation reg [symbol] | 2.12 | 9.54E−06 | Xq28-CGA high |
| CADM4\|199731 | cell adhesion molecule 4 | 2.43 | 2.24E−07 | Xq28-CGA high |
| CALCB\|797 | calcitonin-related polypeptide beta | 2.36 | 1.45E−04 | Xq28-CGA high |
| CAND2\|23066 | cullin-associated and neddylation-dissociated 2 [symbol] | 2.58 | 2.69E−05 | Xq28-CGA high |
| CASP12\|120329 | caspase 12 (gene/pseudogene) | 2.92 | 1.13E−04 | Xq28-CGA high |
| CCDC136\|64753 | coiled-coil domain containing 136 | 3.39 | 3.18E−10 | Xq28-CGA high |
| CCDC144A\|9720 | coiled-coil domain containing 144A | 2.57 | 4.08E−07 | Xq28-CGA high |
| CCDC144B\|284047 | coiled-coil domain containing 144B (pseudogene [symbol] | 2.21 | 1.80E−08 | Xq28-CGA high |
| CCDC144C\|348254 | coiled-coil domain containing 144C, pseudogene [symbol] | 2.08 | 5.83E−07 | Xq28-CGA high |
| CCDC160\|347475 | coiled-coil domain containing 160 | 5.56 | 2.95E−07 | Xq28-CGA high |
| CCDC46\|201134 | centrosomal protein 112 kDa | 2.21 | 2.31E−05 | Xq28-CGA high |
| CCR10\|2826 | chemokine (C-C motif) receptor 10 | 2.59 | 6.20E−05 | Xq28-CGA high |
| CDH12\|1010 | cadherin 12, type 2 (N-cadherin 2) | 2.06 | 1.18E−10 | Xq28-CGA high |
| CDH18\|1016 | cadherin 18, type 2 | 2.26 | 1.43E−08 | Xq28-CGA high |
| CDK14\|5218 | cyclin-dependent kinase 14 | 2.15 | 2.69E−05 | Xq28-CGA high |
| CDK6\|1021 | cyclin-dependent kinase 6 | 2.03 | 3.37E−09 | Xq28-CGA high |
| CFHR4\|10877 | complement factor H-related 4 | 3.93 | 3.25E−15 | Xq28-CGA high |
| CFI\|3426 | complement factor I | 2.32 | 6.77E−06 | Xq28-CGA high |
| CHML\|1122 | choroideremia-like (Rab escort protein 2) | 2.29 | 8.66E−10 | Xq28-CGA high |
| CHRM3\|1131 | cholinergic receptor, muscarinic 3 | 6.32 | 8.83E−09 | Xq28-CGA high |
| CLEC18B\|497190 | C-type lectin domain family 18, member B | 2.8 | 2.48E−07 | Xq28-CGA high |
| CLEC18C\|283971 | C-type lectin domain family 18, member C | 3.29 | 2.57E−06 | Xq28-CGA high |
| CLEC2L\|154790 | C-type lectin domain family 2, member L | 4.49 | 5.06E−10 | Xq28-CGA high |
| CLGN\|1047 | calmegin | 2.63 | 1.48E−04 | Xq28-CGA high |
| CMTM8\|152189 | CKLF-like MARVEL transmembrane domain cont [symbol] | 2.03 | 2.30E−06 | Xq28-CGA high |
| CNDP1\|84735 | carnosine dipeptidase 1 (metallopeptidase M20 | 10.44 | 2.04E−07 | Xq28-CGA high |
| CNR1\|1268 | cannabinoid receptor 1 (brain) | 5.5 | 1.89E−08 | Xq28-CGA high |
| COL11A2\|1302 | collagen, type XI, alpha 2 | 4.71 | 4.25E−06 | Xq28-CGA high |
| COL25A1\|84570 | collagen, type XXV, alpha 1 | 3.06 | 2.67E−05 | Xq28-CGA high |
| COL28A1\|340267 | collagen, type XXVIII, alpha 1 | 2.41 | 6.36E−07 | Xq28-CGA high |
| COX6A2\|1339 | cytochrome c oxidase subunit VIa polypeptide 2 | 24.16 | 9.07E−06 | Xq28-CGA high |
| CPS1\|1373 | carbamoyl-phosphate synthase 1, mitochondrial [symbol] | 2.14 | 5.82E−05 | Xq28-CGA high |
| CPT1C\|126129 | carnitine palmitoyltransferase 1C | 2.45 | 5.38E−08 | Xq28-CGA high |
| CSAG1\|158511 | chondrosarcoma associated gene 1 | 1195.25 | 2.66E−40 | Xq28-CGA high |
| CSAG2\|728461 | CSAG family, member 2 | 2834.71 | 1.71E−44 | Xq28-CGA high |
| CSAG3\|389903 | CSAG family, member 3 | 907.95 | 2.54E−40 | Xq28-CGA high |
| CSMD1\|64478 | CUB and Sushi multiple domains 1 | 65.06 | 9.87E−23 | Xq28-CGA high |
| CSNK1A1P\|161635 | casein kinase 1, alpha 1 pseudogene 1 | 2.79 | 1.12E−04 | Xq28-CGA high |
| CTAG1B\|1485 | cancer/testis antigen 1B | 2124.92 | 2.20E−23 | Xq28-CGA high |
| CTAG2\|30848 | cancer/testis antigen 2 | 3883.48 | 5.49E−22 | Xq28-CGA high |
| CTAGE4\|100128553 | CTAGE family, member 4 | 3.87 | 4.57E−08 | Xq28-CGA high |
| CTAGE6\|340307 | CTAGE family, member 6 | 2.55 | 1.66E−07 | Xq28-CGA high |
| CTAGE9\|643854 | CTAGE family, member 9 | 4.12 | 1.72E−08 | Xq28-CGA high |
| CUZD1\|50624 | CUB and zona pellucida-like domains 1 | 2.51 | 3.82E−07 | Xq28-CGA high |
| CXorf42\|158801 | | 2.95 | 1.11E−04 | Xq28-CGA high |
| CXorf48\|54967 | | 9.38 | 5.16E−17 | Xq28-CGA high |
| CXorf49B\|100132994 | | 2.41 | 1.66E−09 | Xq28-CGA high |
| CYP26A1\|1592 | cytochrome P450, family 26, subfamily A, polype [symbol] | 3.95 | 4.44E−08 | Xq28-CGA high |
| CYP2J2\|1573 | cytochrome P450, family 2, subfamily J, polypep [symbol] | 6.31 | 4.44E−11 | Xq28-CGA high |
| DCAF4L1\|285429 | DDB1 and CUL4 associated factor 4-like 1 | 2.41 | 2.05E−10 | Xq28-CGA high |
| DCAF4L2\|138009 | DDB1 and CUL4 associated factor 4-like 2 | 2.39 | 5.69E−07 | Xq28-CGA high |
| DCAF8L2\|347442 | DDB1 and CUL4 associated factor 8-like 2 | 3.37 | 1.15E−08 | Xq28-CGA high |
| DDIT4L\|115265 | DNA-damage-inducible transcript 4-like | 2.07 | 9.75E−05 | Xq28-CGA high |
| DDO\|8528 | D-aspartate oxidase | 6.08 | 6.90E−08 | Xq28-CGA high |
| DDX25\|29118 | DEAD (Asp-Glu-Ala-Asp) box helicase 25 | 3.43 | 3.83E−06 | Xq28-CGA high |
| DEPDC1\|55635 | DEP domain containing 1 | 2.07 | 8.23E−07 | Xq28-CGA high |
| DHDPSL\|112817 | 4-hydroxy-2-oxoglutarate aldolase 1 | 2.24 | 3.77E−06 | Xq28-CGA high |
| DHRS2\|10202 | dehydrogenase/reductase (SDR family) member | 3.49 | 1.53E−05 | Xq28-CGA high |
| DLX2\|1746 | distal-less homeobox 2 | 2.35 | 1.54E−05 | Xq28-CGA high |
| DMP1\|1758 | dentin matrix acidic phosphoprotein 1 | 2.14 | 2.47E−06 | Xq28-CGA high |
| DNAH2\|146754 | dynein, axonemal, heavy chain 2 | 9.72 | 3.37E−08 | Xq28-CGA high |
| DNAH3\|55567 | dynein, axonemal, heavy chain 3 | 2.36 | 5.81E−10 | Xq28-CGA high |
| DNAH7\|56171 | dynein, axonemal, heavy chain 7 | 2.16 | 2.09E−05 | Xq28-CGA high |
| DNAJC22\|79962 | DnaJ (Hsp40) homolog, subfamily C, member 22 | 2.03 | 3.99E−06 | Xq28-CGA high |
| DNALI1\|7802 | dynein, axonemal, light intermediate chain 1 | 8.88 | 1.18E−07 | Xq28-CGA high |
| DPY19L2P1\|554236 | DPY19L2 pseudogene 1 | 2.35 | 0.000128592 | Xq28-CGA high |
| DSCR10\|259234 | Down syndrome critical region gene 10 (non-pro [symbol] | 4.72 | 2.66E−16 | Xq28-CGA high |
| DSCR4\|10281 | Down syndrome critical region gene 4 | 109.57 | 9.21E−27 | Xq28-CGA high |
| DSCR8\|84677 | Down syndrome critical region gene 8 | 2470.84 | 5.96E−28 | Xq28-CGA high |
| E2F8\|79733 | E2F transcription factor 8 | 2.29 | 3.82E−09 | Xq28-CGA high |
| EFHC2\|80258 | EF-hand domain (C-terminal) containing 2 | 4.41 | 7.66E−06 | Xq28-CGA high |
| EGF\|1950 | epidermal growth factor | 3.74 | 1.76E−07 | Xq28-CGA high |
| ELAVL4\|1996 | ELAV like neuron-specific RNA binding protein 4 | 2.26 | 4.54E−06 | Xq28-CGA high |
| ELOVL2\|54898 | ELOVL fatty add elongase 2 | 3.7 | 3.24E−08 | Xq28-CGA high |
| ENPP4\|22875 | ectonucleotide pyrophosphatase/phosphodieste [symbol] | 3.06 | 4.19E−06 | Xq28-CGA high |
| ENPP5\|59084 | ectonucleotide pyrophosphatase/phosphodieste [symbol] | 4.98 | 1.50E−06 | Xq28-CGA high |
| EPHX4\|253152 | epoxide hydrolase 4 | 3.73 | 1.05E−04 | Xq28-CGA high |
| ERC2\|26059 | ELKS/RAB6-interacting/CAST family member 2 | 2.47 | 7.71E−07 | Xq28-CGA high |
| ERRFI1\|54206 | ERBB receptor feed back inhibitor 1 | 2.05 | 7.88E−08 | Xq28-CGA high |
| ESRRG\|2104 | estrogen-related receptor gamma | 4.89 | 1.36E−04 | Xq28-CGA high |
| EYA1\|2138 | eyes absent homolog 1 (Drosophila) | 40.69 | 6.57E−09 | Xq28-CGA high |
| F5\|2153 | coagulation factor V (proaccelerin, labile factor) | 2.39 | 3.01E−05 | Xq28-CGA high |
| FABP6\|2172 | fatty acid binding protein 6, ileal | 15.12 | 6.38E−07 | Xq28-CGA high |
| FABP7\|2173 | fatty acid binding protein 7, brain | 5.61 | 4.79E−05 | Xq28-CGA high |
| FAM106A\|80039 | family with sequence similarity 106, member A | 2.91 | 8.62E−05 | Xq28-CGA high |
| FAM106C\|100129396 | family with sequence similarity 106, member C, [symbol] | 2.62 | 4.24E−07 | Xq28-CGA high |
| FAM133A\|286499 | family with sequence similarity 133, member A | 85.36 | 1.01E−24 | Xq28-CGA high |
| FAM181B\|220382 | family with sequence similarity 181, member B | 2.58 | 5.11E−05 | Xq28-CGA high |
| FAM196B\|100131897 | family with sequence similarity 196, member B | 3.67 | 1.59E−05 | Xq28-CGA high |
| FAM46D\|169966 | family with sequence similarity 46, member D | 3.06 | 4.07E−05 | Xq28-CGA high |
| FAM81B\|153643 | family with sequence similarity 81, member B | 2.77 | 5.78E−05 | Xq28-CGA high |
| FBXL13\|222235 | F-box and leucine-rich repeat protein 13 | 2.47 | 2.05E−11 | Xq28-CGA high |
| FER1L4\|80307 | fer-1-like 4 (C. elegans), pseudogene | 2.43 | 7.52E−06 | Xq28-CGA high |
| FGF2\|2247 | fibroblast growth factor 2 (basic) | 3.96 | 1.07E−06 | Xq28-CGA high |
| FHAD1\|114827 | forkhead-associated (FHA) phosphopeptide bind [symbol] | 4.6 | 2.36E−09 | Xq28-CGA high |
| FIGF\|2277 | c-fos induced growth factor (vascular endothelia [symbol] | 2.69 | 2.20E−06 | Xq28-CGA high |
| FKBP1B\|2281 | FK506 binding protein 1B, 12.6 kDa | 2.35 | 1.77E−07 | Xq28-CGA high |
| FLI36000\|284124 | uncharacterized FLI36000 | 21.56 | 3.27E−13 | Xq28-CGA high |
| FLI44606\|401207 | | 2.53 | 1.53E−06 | Xq28-CGA high |
| FMNL2\|114793 | formin-like 2 | 2.09 | 1.37E−07 | Xq28-CGA high |
| FOXA3\|3171 | forkhead box A3 | 2.6 | 4.37E−05 | Xq28-CGA high |
| FOXR2\|139628 | forkhead box R2 | 2.42 | 1.05E−10 | Xq28-CGA high |
| FRAS1\|80144 | Fraser syndrome 1 | 3.4 | 8.26E−05 | Xq28-CGA high |
| G6PC2\|57818 | glucose-6-phosphatase, catalytic, 2 | 2.57 | 1.53E−04 | Xq28-CGA high |
| GABRA3\|2556 | gamma-aminobutyric acid (GABA) A receptor, al [symbol] | 530.61 | 4.59E−39 | Xq28-CGA high |
| GABRB1\|2560 | gamma-aminobutyric acid (GABA) A receptor, be [symbol] | 3.14 | 1.41E−07 | Xq28-CGA high |
| GABRG2\|2566 | gamma-aminobutyric acid (GABA) A receptor, ga [symbol] | 7.02 | 5.68E−19 | Xq28-CGA high |
| GABRP\|2568 | gamma-aminobutyric acid (GABA) A receptor, pi [symbol] | 3.95 | 3.91E−06 | Xq28-CGA high |
| GABRQ\|55879 | gamma-aminobutyric acid (GABA) A receptor, th [symbol] | 9.7 | 2.72E−17 | Xq28-CGA high |
| GAGE12D\|100132399 | G antigen 12D | 399.62 | 1.14E−17 | Xq28-CGA high |
| GAGE12J\|729396 | G antigen 12J | 45.61 | 1.67E−18 | Xq28-CGA high |
| GAGE1\|2543 | G antigen 1 | 45.46 | 1.61E−16 | Xq28-CGA high |
| GAGE2A\|729447 | G antigen 2A | 21.71 | 4.92E−13 | Xq28-CGA high |
| GAGE2D\|729408 | G antigen 2D | 209.41 | 7.37E−17 | Xq28-CGA high |
| GAGE4\|2576 | G antigen 4 | 300.81 | 1.27E−18 | Xq28-CGA high |
| GAGE8\|100101629 | G antigen 8 | 12.62 | 5.69E−13 | Xq28-CGA high |
| GALNT8\|26290 | polypeptide N-acetylgalactosaminyltransferase 8 [symbol] | 2.32 | 1.82E−08 | Xq28-CGA high |
| GAP43\|2596 | growth associated protein 43 | 4.67 | 1.31E−06 | Xq28-CGA high |
| GAS2\|2620 | growth arrest-specific 2 | 2.16 | 3.79E−06 | Xq28-CGA high |
| GBA3\|57733 | glucosidase, beta, acid 3 (gene/pseudogene) | 4.36 | 1.08E−06 | Xq28-CGA high |
| GDNF\|2668 | glial cell derived neurotrophic factor | 6.24 | 7.41E−07 | Xq28-CGA high |
| GJC3\|349149 | gap junction protein, gamma 3, 30.2 kDa | 2.03 | 2.74E−05 | Xq28-CGA high |
| GLB1L\|79411 | galactosidase, beta 1-like | 2.76 | 2.05E−07 | Xq28-CGA high |
| GLRB\|2743 | glycine receptor, beta | 6.29 | 4.68E−05 | Xq28-CGA high |
| GNGT1\|2792 | guanine nucleotide binding protein (G protein), g [symbol] | 22.02 | 2.12E−19 | Xq28-CGA high |
| GPR126\|57211 | | 3.45 | 5.41E−07 | Xq28-CGA high |
| GPR152\|390212 | G protein-coupled receptor 152 | 3.67 | 3.07E−05 | Xq28-CGA high |
| GPR158\|57512 | G protein-coupled receptor 158 | 7.06 | 2.44E−09 | Xq28-CGA high |
| GPR81\|27198 | hydroxycarboxylic acid receptor 1 | 4.5 | 9.46E−07 | Xq28-CGA high |
| GRB14\|2888 | growth factor receptor-bound protein 14 | 3.68 | 6.32E−05 | Xq28-CGA high |
| GRIA2\|2891 | glutamate receptor, ionotropic, AMPA 2 | 6.35 | 3.90E−10 | Xq28-CGA high |
| GSTT2\|2953 | glutathione S-transferase theta 2 | 3.36 | 3.47E−05 | Xq28-CGA high |
| GTSF1\|121355 | gametocyte specific factor 1 | 10.19 | 5.52E−13 | Xq28-CGA high |
| GUCY1B2\|2974 | guanylate cyclase 1, soluble, beta 2 (pseudogene [symbol] | 2.42 | 3.92E−06 | Xq28-CGA high |
| GULP1\|51454 | GULP, engulfment adaptor PTB domain containi [symbol] | 2.01 | 3.62E−05 | Xq28-CGA high |
| GYPE\|2996 | glycophorin E (MNS blood group) | 2.37 | 2.66E−05 | Xq28-CGA high |
| HAPLN1\|1404 | hyaluronan and proteoglycan link protein 1 | 2.44 | 9.80E−06 | Xq28-CGA high |
| HAPLN2\|60484 | hyaluronan and proteoglycan link protein 2 | 2.02 | 1.21E−04 | Xq28-CGA high |
| HBE1\|3046 | hemoglobin, epsilon 1 | 17.69 | 6.64E−11 | Xq28-CGA high |
| HBG2\|3048 | hemoglobin, gamma G | 3.68 | 1.18E−06 | Xq28-CGA high |
| HERC2P4\|440362 | hect domain and RLD 2 pseudogene 4 | 2.31 | 1.22E−09 | Xq28-CGA high |
| HFE2\|148738 | hemochromatosis type 2 (juvenile) | 2.72 | 5.88E−05 | Xq28-CGA high |
| HFM1\|164045 | HFM1, ATP-dependent DNA helicase homolog (S [symbol] | 2.53 | 3.95E−07 | Xq28-CGA high |
| HHATL\|57467 | hedgehog acyltransferase-like | 5.41 | 8.80E−06 | Xq28-CGA high |
| HHLA2\|11148 | HERV-H LTR-associating 2 | 3.23 | 3.53E−06 | Xq28-CGA high |
| HIST1H2BF\|8343 | histone cluster 1, H2bf | 2.45 | 3.66E−06 | Xq28-CGA high |
| HIST2H4A\|8370 | histone cluster 2, H4a | 2.03 | 1.36E−05 | Xq28-CGA high |
| HIVEP3\|59269 | human immunodeficiency virus type I enhancer | 2.08 | 3.98E−08 | Xq28-CGA high |
| HMGA2\|8091 | high mobility group AT-hook 2 | 5.05 | 1.37E−08 | Xq28-CGA high |
| HOOK1\|51361 | hook microtubule-tethering protein 1 | 2.89 | 5.09E−06 | Xq28-CGA high |
| HORMAD1\|84072 | HORMA domain containing 1 | 26.19 | 2.43E−06 | Xq28-CGA high |
| HOXA1\|3198 | homeobox A1 | 2.06 | 4.88E−05 | Xq28-CGA high |
| HOXA2\|3199 | homeobox A2 | 2.1 | 0.000153759 | Xq28-CGA high |
| HOXA3\|3200 | homeobox A3 | 2.87 | 7.97E−05 | Xq28-CGA high |
| HOXC10\|3226 | homeobox C10 | 2.47 | 2.92E−06 | Xq28-CGA high |
| HOXD10\|3236 | homeobox D10 | 2.1 | 4.39E−06 | Xq28-CGA high |
| HOXD11\|3237 | homeobox D11 | 2.87 | 1.30E−05 | Xq28-CGA high |
| HOXD13\|3239 | homeobox D13 | 6.95 | 1.38E−11 | Xq28-CGA high |
| HS3ST5\|222537 | heparan sulfate (glucosamine) 3-O-sulfotransfer [symbol] | 3.04 | 8.25E−06 | Xq28-CGA high |
| HSD17B3\|3293 | hydroxysteroid (17-beta) dehydrogenase 3 | 2.34 | 1.58E−05 | Xq28-CGA high |
| HSPC072\|29075 | long intergenic non-protein coding RNA 652 | 3.03 | 6.30E−09 | Xq28-CGA high |
| HTN1\|3346 | histatin 1 | 27.42 | 4.20E−05 | Xq28-CGA high |
| HTR2C\|3358 | 5-hydroxytryptamme (serotonin) receptor 2C, G | 3.58 | 9.07E−14 | Xq28-CGA high |
| HTR3E\|285242 | 5-hydroxytryptamine (serotonin) receptor 3E, io [symbol] | 2.43 | 3.95E−08 | Xq28-CGA high |
| HULC\|728655 | hepatocellular carcinoma up-regulated long non [symbol] | 28.25 | 1.12E−08 | Xq28-CGA high |
| HYDIN\|54768 | HYDIN, axonemal central pair apparatus protein | 2.82 | 3.89E−05 | Xq28-CGA high |
| ID4\|3400 | inhibitor of DNA binding 4, dominant negative h [symbol] | 2.5 | 7.97E−05 | Xq28-CGA high |
| IGF2BP3\|10643 | insulin-like growth factor 2 mRNA binding protei [symbol] | 2.58 | 4.48E−06 | Xq28-CGA high |
| IGFN1\|91156 | immunoglobulin-like and fibronectin type III don [symbol] | 2.41 | 1.67E−06 | Xq28-CGA high |
| IL13RA2\|3598 | interleukin 13 receptor, alpha 2 | 41.62 | 3.72E−14 | Xq28-CGA high |
| IL1RAPL1\|11141 | interleukin 1 receptor accessory protein-like 1 | 5.55 | 3.11E−05 | Xq28-CGA high |
| IL31RA\|133396 | interleukin 31 receptor A | 2.54 | 0.000141763 | Xq28-CGA high |
| INADL\|10207 | InaD-like (Drosophila) | 2.11 | 1.36E−04 | Xq28-CGA high |
| INTU\|27152 | inturned planar cell polarity protein | 2.06 | 1.94E−08 | Xq28-CGA high |
| IQUB\|154865 | IQ motif and ubiquitin domain containing | 2.22 | 1.03E−07 | Xq28-CGA high |
| ISL2\|64843 | ISL LIM homeobox 2 | 4.66 | 1.46E−08 | Xq28-CGA high |
| ITGB3\|3690 | integrin, beta 3 (platelet glycoprotein IIIa, antige [symbol] | 2.42 | 1.98E−05 | Xq28-CGA high |
| ITPRIPL1\|150771 | inositol 1,4,5-trisphosphate receptor interacting | 2.42 | 1.44E−05 | Xq28-CGA high |
| KC6\|641516 | keratoconus gene 6 | 2.67 | 4.58E−11 | Xq28-CGA high |
| KCNA6\|3742 | potassium voltage-gated channel, shaker-relate [symbol] | 2.36 | 6.63E−05 | Xq28-CGA high |
| KCNAB3\|9196 | potassium voltage-gated channel, shaker-relate [symbol] | 2.09 | 1.68E−05 | Xq28-CGA high |
| KCNC2\|3747 | potassium voltage-gated channel, Shaw-related [symbol] | 2.09 | 2.21E−08 | Xq28-CGA high |
| KCNH5\|27133 | potassium voltage-gated channel, subfamily H (e [symbol] | 2.6 | 5.13E−12 | Xq28-CGA high |
| KCNJ10\|3766 | potassium inwardly-rectifying channel, subfamil [symbol] | 3.49 | 6.79E−08 | Xq28-CGA high |
| KCNMB2\|10242 | potassium large conductance calcium-activated [symbol] | 2.34 | 1.16E−08 | Xq28-CGA high |
| KCNS1\|3787 | potassium voltage-gated channel, delayed-rectif [symbol] | 2.67 | 4.00E−05 | Xq28-CGA high |
| KIAA0664P3\|1001323 | clustered mitochondria (cluA/CLU1) homolog ps [symbol] | 2.76 | 6.68E−05 | Xq28-CGA high |
| KIAA1324L\|222223 | KIAA1324-like | 2.71 | 1.38E−07 | Xq28-CGA high |
| KIAA1377\|57562 | | 2.39 | 2.61E−07 | Xq28-CGA high |
| KIAA1383\|54627 | microtubule-associated protein 10 | 2.54 | 7.63E−08 | Xq28-CGA high |
| KIF17\|57576 | kinesin family member 17 | 2.73 | 1.27E−04 | Xq28-CGA high |
| KIF5A\|3798 | kinesin family member 5A | 3.68 | 1.28E−09 | Xq28-CGA high |
| KLF14\|136259 | Kruppel-like factor 14 | 4.57 | 1.86E−11 | Xq28-CGA high |
| KLF17\|128209 | Kruppel-like factor 17 | 2.17 | 2.09E−05 | Xq28-CGA high |
| KLHL13\|90293 | kelch-like family member 13 | 4.48 | 5.29E−05 | Xq28-CGA high |
| KLHL23\|151230 | kelch-fike family member 23 | 2.44 | 4.64E−07 | Xq28-CGA high |
| KLK2\|3817 | kallikrein-related peptidase 2 | 6.77 | 2.54E−08 | Xq28-CGA high |
| KRT18\|3875 | keratin 18 | 5.23 | 5.86E−08 | Xq28-CGA high |
| LCTL\|197021 | lactase-like | 2.59 | 3.49E−05 | Xq28-CGA high |
| LGALS12\|85329 | lectin, galactoside-binding, soluble, 12 | 3.39 | 3.69E−08 | Xq28-CGA high |
| LIN28A\|79727 | lin-28 homolog A (C. elegans) | 2.57 | 5.88E−07 | Xq28-CGA high |
| LIN28B\|389421 | lin-28 homolog B (C. elegans) | 5.07 | 1.09E−08 | Xq28-CGA high |
| LMOD2\|442721 | leiomodin 2 (cardiac) | 2.2 | 3.12E−07 | Xq28-CGA high |
| LOC100128675\|100128675 | | 15.63 | 6.73E−07 | Xq28-CGA high |
| LOC100130386\|100130386 | | 2.69 | 5.98E−06 | Xq28-CGA high |
| LOC100133469\|100133469 | | 1402.15 | 4.13E−30 | Xq28-CGA high |
| LOC100190938\|100190938 | | 3.14 | 3.54E−08 | Xq28-CGA high |
| LOC100240726\|100240726 | | 2.76 | 5.77E−05 | Xq28-CGA high |
| LOC100271722\|100271722 | | 2.04 | 1.35E−05 | Xq28-CGA high |
| LOC116437\|116437 | | 2.23 | 2.01E−05 | Xq28-CGA high |
| LOC134466\|134466 | | 5.45 | 2.54E−09 | Xq28-CGA high |
| LOC146481\|146481 | | 8.29 | 1.42E−04 | Xq28-CGA high |
| LOC148824\|148824 | | 2.32 | 2.45E−05 | Xq28-CGA high |
| LOC150197\|150197 | | 2.73 | 4.51E−06 | Xq28-CGA high |
| LOC153910\|153910 | | 5.04 | 1.12E−10 | Xq28-CGA high |
| LOC162632\|162632 | | 2.36 | 7.79E−05 | Xq28-CGA high |
| LOC220594\|220594 | | 3.17 | 6.92E−05 | Xq28-CGA high |
| LOC220930\|220930 | | 2.19 | 0.000106118 | Xq28-CGA high |
| LOC257358\|257358 | | 2.12 | 9.99E−07 | Xq28-CGA high |
| LOC285419\|285419 | | 2.17 | 9.57E−05 | Xq28-CGA high |
| LOC285501\|285501 | | 4.41 | 5.54E−17 | Xq28-CGA high |
| LOC285548\|285548 | | 2.74 | 9.57E−07 | Xq28-CGA high |
| LOC286002\|286002 | | 5.97 | 2.13E−07 | Xq28-CGA high |
| LOC286467\|286467 | | 3.3 | 3.82E−09 | Xq28-CGA high |
| LOC339535\|339535 | | 3.3 | 4.53E−06 | Xq28-CGA high |
| LOC374491\|374491 | | 2.68 | 6.92E−08 | Xq28-CGA high |
| LOC399815\|399815 | chromosome 10 open reading frame 88 pseudog [symbol] | 2.04 | 1.51E−05 | Xq28-CGA high |
| LOC399959\|399959 | | 4.61 | 8.73E−07 | Xq28-CGA high |
| LOC440563\|440563 | | 2.05 | 1.08E−05 | Xq28-CGA high |
| LOC440905\|440905 | | 2.84 | 5.41E−07 | Xq28-CGA high |
| LOC441046\|441046 | | 3.08 | 3.17E−08 | Xq28-CGA high |
| LOC441294\|441294 | | 4.98 | 1.05E−08 | Xq28-CGA high |
| LOC441601\|441601 | septin 7 pseudogene | 3.35 | 3.65E−12 | Xq28-CGA high |
| LOC645323\|645323 | | 2.92 | 7.58E−07 | Xq28-CGA high |
| LOC646627\|646627 | | 8.95 | 6.72E−07 | Xq28-CGA high |
| LOC648691\|648691 | | 2.64 | 4.38E−09 | Xq28-CGA high |
| LOC728819\|728819 | | 6.45 | 1.05E−13 | Xq28-CGA high |
| LOC84740\|84740 | | 2.05 | 1.49E−07 | Xq28-CGA high |
| LPAR3\|23566 | lysophosphatidic acid receptor 3 | 3.19 | 8.77E−05 | Xq28-CGA high |
| LPPR1\|54886 | lipid phosphate phosphatase-related protein typ [symbol] | 4.08 | 2.89E−08 | Xq28-CGA high |
| LPPR5\|163404 | lipid phosphate phosphatase-related protein typ [symbol] | 2.13 | 5.11E−05 | Xq28-CGA high |
| LRCH2\|57631 | leucine-rich repeats and calponin homology (CH) [symbol] | 6.46 | 9.89E−09 | Xq28-CGA high |
| LRP4\|4038 | low density lipoprotein receptor-related protein | 2.53 | 4.73E−08 | Xq28-CGA high |
| LRRC52\|440699 | leucine rich repeat containing 52 | 3.49 | 3.81E−05 | Xq28-CGA high |
| LRRC69\|100130742 | leucine rich repeat containing 69 | 3.12 | 9.90E−11 | Xq28-CGA high |
| LRRIQ1\|84125 | leucine-rich repeats and IQ motif containing 1 | 7.44 | 3.41E−07 | Xq28-CGA high |
| LYG2\|254773 | lysozyme G-like 2 | 4.85 | 3.08E−07 | Xq28-CGA high |
| MAEL\|84944 | maelstrom spermatogenic transposon silencer | 3.41 | 2.44E−05 | Xq28-CGA high |
| MAGEA10\|4109 | melanoma antigen family A, 10 | 1422.65 | 7.86E−33 | Xq28-CGA high |
| MAGEA11\|4110 | melanoma antigen family A, 11 | 93.76 | 3.72E−22 | Xq28-CGA high |
| MAGEA12\|4111 | melanoma antigen family A, 12 | 1533.86 | 3.82E−40 | Xq28-CGA high |
| MAGEA1\|4100 | melanoma antigen family A, 1 (directs expressio [symbol] | 1309.3 | 3.67E−32 | Xq28-CGA high |
| MAGEA2\|4101 | melanoma antigen family A, 2 | 2276.53 | 1.98E−40 | Xq28-CGA high |
| MAGEA3\|4102 | melanoma antigen family A, 3 | 2434.59 | 3.72E−40 | Xq28-CGA high |
| MAGEA4\|4103 | melanoma antigen family A, 4 | 365.89 | 9.45E−18 | Xq28-CGA high |
| MAGEA5\|4104 | melanoma antigen family A, 5 | 10.12 | 3.15E−25 | Xq28-CGA high |
| MAGEA6\|4105 | melanoma antigen family A, 6 | 2536.59 | 3.81E−40 | Xq28-CGA high |
| MAGEA8\|4107 | melanoma antigen family A, 8 | 2.32 | 2.02E−05 | Xq28-CGA high |
| MAGEA9B\|728269 | melanoma antigen family A, 9B | 11.92 | 2.73E−14 | Xq28-CGA high |
| MAGEB16\|139604 | melanoma antigen family B, 16 | 2.6 | 2.58E−19 | Xq28-CGA high |
| MAGEB1\|4112 | melanoma antigen family B, 1 | 4.62 | 1.91E−17 | Xq28-CGA high |
| MAGEB2\|4113 | melanoma antigen family B, 2 | 47.51 | 1.38E−19 | Xq28-CGA high |
| MAGEB6\|158809 | melanoma antigen family B, 6 | 8.62 | 4.45E−18 | Xq28-CGA high |
| MAGEC1\|9947 | melanoma antigen family C, 1 | 737.15 | 2.15E−30 | Xq28-CGA high |
| MAGEC2\|51438 | melanoma antigen family C, 2 | 2411.41 | 7.48E−26 | Xq28-CGA high |
| MAGEC3\|139081 | melanoma antigen family C, 3 | 3.64 | 2.47E−12 | Xq28-CGA high |
| MAOA\|4128 | monoamine oxidase A | 2.94 | 1.23E−05 | Xq28-CGA high |
| MAP9\|79884 | microtubule-associated protein 9 | 4.12 | 2.29E−06 | Xq28-CGA high |
| MAT1A\|4143 | methionine adenosyltransferase I, alpha | 5.07 | 2.73E−06 | Xq28-CGA high |
| MEGF10\|84466 | multiple EGF-like-domains 10 | 18.91 | 1.58E−09 | Xq28-CGA high |
| MGAT4C\|25834 | mannosyl (alpha-1,3-)-glycoprotein beta-1,4-N-a [symbol] | 7.44 | 2.17E−14 | Xq28-CGA high |
| MGC16121\|84848 | | 2.03 | 5.68E−05 | Xq28-CGA high |
| MMEL1\|79258 | membrane metallo-endopeptidase-like 1 | 3.01 | 4.77E−05 | Xq28-CGA high |
| MMP16\|4325 | matrix metallopeptidase 16 (membrane-inserte [symbol] | 4.58 | 1.21E−05 | Xq28-CGA high |
| MOG\|4340 | myelin oligodendrocyte glycoprotein | 4.42 | 1.62E−05 | Xq28-CGA high |
| MORC1\|27136 | MORC famiy CW-type zinc finger 1 | 9.55 | 1.50E−10 | Xq28-CGA high |
| MPPED2\|744 | metallophosphoesterase domain containing 2 | 2.21 | 1.16E−04 | Xq28-CGA high |
| MRGPRX3\|117195 | MAS-related GPR, member X3 | 11.36 | 1.44E−10 | Xq28-CGA high |
| MS4A15\|219995 | membrane-spanning 4-domains, subfamily A, m [symbol] | 4.4 | 1.45E−04 | Xq28-CGA high |
| MST4\|51765 | | 3.18 | 5.54E−07 | Xq28-CGA high |
| MT1G\|4495 | metallothionein 1G | 2.32 | 2.01E−05 | Xq28-CGA high |
| MT1H\|4496 | metallothionein 1H | 2.55 | 4.65E−05 | Xq28-CGA high |
| MUC15\|143662 | mucin 15, cell surface associated | 17.34 | 1.07E−11 | Xq28-CGA high |
| MYADML2\|255275 | myeloid-associated differentiation marker-like 2 [symbol] | 2.07 | 5.51E−07 | Xq28-CGA high |
| MYBPC1\|4604 | myosin binding protein C, slow type | 3.42 | 5.56E−07 | Xq28-CGA high |
| MYH13\|8735 | myosin, heavy chain 13, skeletal muscle | 4.59 | 2.26E−08 | Xq28-CGA high |
| MYH15\|22989 | myosin, heavy chain 15 | 2.13 | 1.90E−06 | Xq28-CGA high |
| MYOT\|9499 | myotillin | 2.45 | 6.28E−06 | Xq28-CGA high |
| MYOZ3\|91977 | myozenin 3 | 2.49 | 4.58E−05 | Xq28-CGA high |
| NAA11\|84779 | N(alpha)-acetyltransferase 11, NatA catalytic su [symbol] | 8.03 | 2.57E−18 | Xq28-CGA high |
| NBPF22P\|285622 | neuroblastoma breakpoint family, member 22, p [symbol] | 4.32 | 3.64E−08 | Xq28-CGA high |
| NBPF4\|148545 | neuroblastoma breakpoint family, member 4 | 10.14 | 8.18E−09 | Xq28-CGA high |
| NBPF6\|653149 | neuroblastoma breakpoint family, member 6 | 13.18 | 2.09E−07 | Xq28-CGA high |
| NCRNA00189\|193629 | long intergenic non-protein coding RNA 189 | 16.16 | 5.66E−07 | Xq28-CGA high |
| NEB\|4703 | nebulin | 2.34 | 3.07E−09 | Xq28-CGA high |
| NECAB1\|64168 | N-terminal EF-hand calcium binding protein 1 | 2.02 | 1.13E−09 | Xq28-CGA high |
| NFE2L3\|9603 | nuclear factor, erythroid 2-like 3 | 2.68 | 2.30E−09 | Xq28-CGA high |
| NFIA\|4774 | nuclear factor I/A | 2.24 | 9.57E−09 | Xq28-CGA high |
| NLGN3\|54413 | neuroligin 3 | 2.67 | 4.69E−06 | Xq28-CGA high |
| NLRP11\|204801 | NLR family, pyrin domain containing 11 | 5.18 | 5.32E−12 | Xq28-CGA high |
| NLRP4\|147945 | NLR family, pyrin domain containing 4 | 4.25 | 3.07E−09 | Xq28-CGA high |
| NOX4\|50507 | NADPH oxidase 4 | 3.66 | 2.75E−07 | Xq28-CGA high |
| NPY6R\|4888 | neuropeptide Y receptor Y6 (pseudogene) | 3.12 | 4.69E−09 | Xq28-CGA high |
| NXPH1\|30010 | neurexophilin 1 | 3 | 3.58E−06 | Xq28-CGA high |
| OCIAD2\|132299 | OCIA domain containing 2 | 2.48 | 9.31E−05 | Xq28-CGA high |
| OCLM\|10896 | oculomedin | 2.03 | 1.08E−09 | Xq28-CGA high |
| ODZ1\|10178 | teneurin transmembrane protein 1 | 2.23 | 1.64E−06 | Xq28-CGA high |
| OLFM3\|118427 | olfactomedin 3 | 2.32 | 9.03E−07 | Xq28-CGA high |
| OLIG2\|10215 | oligodendrocyte lineage transcription factor 2 | 25.54 | 3.80E−06 | Xq28-CGA high |
| OMP\|4975 | olfactory marker protein | 2.38 | 1.18E−08 | Xq28-CGA high |
| OR1J2\|26740 | olfactory receptor, family 1, subfamily J, membe [symbol] | 2.01 | 6.40E−06 | Xq28-CGA high |
| OR2A1\|346528 | olfactory receptor, family 2, subfamily A, membe [symbol] | 3.14 | 2.58E−06 | Xq28-CGA high |
| OR2A25\|392138 | olfactory receptor, family 2, subfamily A, membe [symbol] | 5.45 | 9.70E−07 | Xq28-CGA high |
| OR2A4\|79541 | olfactory receptor, family 2, subfamily A, membe [symbol] | 3.39 | 4.54E−06 | Xq28-CGA high |
| OR2A7\|401427 | olfactory receptor, family 2, subfamily A, membe [symbol] | 2.49 | 2.32E−05 | Xq28-CGA high |
| OR2A9P\|441295 | olfactory receptor, family 2, subfamily A, membe [symbol] | 3.33 | 1.98E−07 | Xq28-CGA high |
| OR2B6\|26212 | olfactory receptor, family 2, subfamily B, membe [symbol] | 2.16 | 1.03E−04 | Xq28-CGA high |
| OR2H2\|7932 | olfactory receptor, family 2, subfamily H, membe [symbol] | 6.93 | 5.96E−06 | Xq28-CGA high |
| OR51B5\|282763 | olfactory receptor, family 51, subfamily B, memb [symbol] | 4.35 | 3.04E−11 | Xq28-CGA high |
| OR56B4\|196335 | olfactory receptor, family 56, subfamily B, memb [symbol] | 4.94 | 7.66E−06 | Xq28-CGA high |
| OR7E5P\|219445 | olfactory receptor, family 7, subfamily E, membe [symbol] | 2.38 | 2.35E−12 | Xq28-CGA high |
| OR8A1\|390275 | olfactory receptor, family 8, subfamily A, membe [symbol] | 4.39 | 1.09E−20 | Xq28-CGA high |
| OXGR1\|27199 | oxoglutarate (alpha-ketoglutarate) receptor 1 | 3.49 | 0.000140551 | Xq28-CGA high |
| PAGE1\|8712 | P antigen family, member 1 (prostate associated [symbol] | 6.35 | 8.46E−11 | Xq28-CGA high |
| PAGE2B\|389860 | P antigen family, member 2B | 19.39 | 1.50E−12 | Xq28-CGA high |
| PAGE5\|90737 | P antigen family, member 5 (prostate associated [symbol] | 2367.74 | 5.52E−23 | Xq28-CGA high |
| PAH\|5053 | phenylalanine hydroxylase | 3.81 | 3.54E−06 | Xq28-CGA high |
| PALM3\|342979 | paralemmin 3 | 2.67 | 2.20E−05 | Xq28-CGA high |
| PANX3\|116337 | pannexin 3 | 3.87 | 4.49E−19 | Xq28-CGA high |
| PAR5\|8123 | Prader Willi/Angelman region RNA 5 | 2.13 | 1.30E−05 | Xq28-CGA high |
| PASD1\|139135 | PAS domain containing 1 | 2.29 | 5.56E−15 | Xq28-CGA high |
| PCDH7\|5099 | protocadherin 7 | 2.25 | 3.74E−05 | Xq28-CGA high |
| PCDHB18\|54660 | | 2.09 | 1.13E−04 | Xq28-CGA high |
| PCDHGA2\|56113 | protocadherin gamma subfamily A, 2 | 2.48 | 1.02E−05 | Xq28-CGA high |
| PCSK1\|5122 | proprotein convertase subtilisin/kexin type 1 | 3.29 | 3.12E−05 | Xq28-CGA high |
| PDC\|5132 | phosducin | 3.81 | 1.02E−06 | Xq28-CGA high |
| PDIA2\|64714 | protein disulfide isomerase family A, member 2 | 3.74 | 3.41E−07 | Xq28-CGA high |
| PDK4\|5166 | pyruvate dehydrogenase kinase, isozyme 4 | 2.6 | 2.60E−05 | Xq28-CGA high |
| PEG10\|23089 | paternally expressed 10 | 2.16 | 9.13E−06 | Xq28-CGA high |
| PEX5L\|51555 | peroxisomal biogenesis factor 5-like | 2.32 | 5.38E−07 | Xq28-CGA high |
| PGAM2\|5224 | phosphoglycerate mutase 2 (muscle) | 2.01 | 1.81E−08 | Xq28-CGA high |
| PI15\|51050 | peptidase inhibitor 15 | 5.2 | 1.20E−06 | Xq28-CGA high |
| PKIA\|5569 | protein kinase (cAMP-dependent, catalytic) inhi [symbol] | 3.07 | 0.00012646 | Xq28-CGA high |
| PLAC1\|10761 | placenta-specific 1 | 3.58 | 1.67E−09 | Xq28-CGA high |
| PLCB1\|23236 | phospholipase C, beta 1 (phosphoinositide-speci [symbol] | 8.55 | 1.87E−19 | Xq28-CGA high |
| PLCB4\|5332 | phospholipase C, beta 4 | 12.5 | 4.71E−07 | Xq28-CGA high |
| PLCE1\|51196 | phospholipase C, epsilon 1 | 2.3 | 6.81E−05 | Xq28-CGA high |
| PLEKHB1\|58473 | pleckstrin homology domain containing, family B [symbol] | 3.79 | 3.13E−07 | Xq28-CGA high |
| PLS1\|5357 | plastin 1 | 2.64 | 6.71E−06 | Xq28-CGA high |
| PMFBP1\|83449 | polyamine modulated factor 1 binding protein 1 | 2.59 | 6.38E−08 | Xq28-CGA high |
| POU5F1B\|5462 | POU class 5 homeobox 1B | 3.69 | 1.48E−09 | Xq28-CGA high |
| POU6F2\|11281 | POU class 6 homeobox 2 | 2.55 | 1.28E−12 | Xq28-CGA high |
| PPIEL\|728448 | peptidylprolyl isomerase E-like pseudogene | 2.09 | 3.83E−05 | Xq28-CGA high |
| PPP1R1B\|84152 | protein phosphatase 1, regulatory (inhibitor) sub [symbol] | 2.91 | 5.01E−05 | Xq28-CGA high |
| PPP1R1C\|151242 | protein phosphatase 1, regulatory (inhibitor) sub [symbol] | 5.08 | 1.17E−10 | Xq28-CGA high |
| PPP1R9A\|55607 | protein phosphatase 1, regulatory subunit 9A | 2.39 | 9.20E−07 | Xq28-CGA high |
| PPP2R2B\|5521 | protein phosphatase 2, regulatory subunit B, bet [symbol] | 2.35 | 9.31E−05 | Xq28-CGA high |
| PRKAA2\|5563 | protein kinase, AMP-activated, alpha 2 catalytic [symbol] | 3.72 | 1.16E−05 | Xq28-CGA high |
| PRSS21\|10942 | protease, serine, 21 (testisin) | 4.9 | 5.77E−05 | Xq28-CGA high |
| PSG9\|5678 | pregnancy specific beta-1-glycoprotein 9 | 2.87 | 3.35E−05 | Xq28-CGA high |
| PTN\|5764 | pleiotrophin | 2.17 | 2.20E−05 | Xq28-CGA high |
| PTPN20B\|26095 | | 5.03 | 1.97E−05 | Xq28-CGA high |
| PYY2\|23615 | peptide YY, 2 (pseudogene) | 2.06 | 1.36E−04 | Xq28-CGA high |
| RAB26\|25837 | RAB26, member RAS oncogene family | 2.73 | 3.05E−09 | Xq28-CGA high |
| RAB3IP\|117177 | RAB3A interacting protein | 2.68 | 5.23E−07 | Xq28-CGA high |
| RAPGEF4\|11069 | Rap guanine nucleotide exchange factor (GEF) 4 | 2.89 | 2.90E−05 | Xq28-CGA high |
| RARB\|5915 | retinoic acid receptor, beta | 4.72 | 1.52E−06 | Xq28-CGA high |
| RBM20\|282996 | RNA binding motif protein 20 | 6.07 | 4.51E−07 | Xq28-CGA high |
| RBMS3\|27303 | RNA binding motif, single stranded interacting p [symbol] | 2.59 | 2.84E−05 | Xq28-CGA high |
| RCOR2\|283248 | REST corepressor 2 | 2.96 | 5.46E−05 | Xq28-CGA high |
| RFPL4B\|442247 | ret finger protein-like 4B | 2.53 | 5.32E−06 | Xq28-CGA high |
| RFX4\|5992 | regulatory factor X, 4 (influences HLA class II exp [symbol] | 2.57 | 4.43E−10 | Xq28-CGA high |
| RGNEF\|64283 | Rho guanine nucleotide exchange factor (GEF) 2 [symbol] | 2.23 | 3.17E−06 | Xq28-CGA high |
| RLBP1\|6017 | retinaldehyde binding protein 1 | 7.09 | 8.78E−09 | Xq28-CGA high |
| RNASE10\|338879 | ribonuclease, RNase A family, 10 (non-active) | 2.01 | 0.000118574 | Xq28-CGA high |
| RND2\|8153 | Rho family GTPase 2 | 3.68 | 1.26E−08 | Xq28-CGA high |
| RNF175\|285533 | ring finger protein 175 | 10.89 | 8.92E−10 | Xq28-CGA high |
| RPS15AP10\|728963 | ribosomal protein S15a pseudogene 10 | 2.07 | 1.12E−07 | Xq28-CGA high |
| RYR2\|6262 | ryanodine receptor 2 (cardiac) | 3.28 | 2.76E−06 | Xq28-CGA high |
| SCAND3\|114821 | | 2.01 | 5.38E−05 | Xq28-CGA high |
| SCARNA16\|677781 | small Cajal body-spedfic RNA 16 | 2.43 | 7.17E−07 | Xq28-CGA high |
| SCN2A\|6326 | sodium channel, voltage-gated, type II, alpha sub [symbol] | 2.19 | 1.44E−06 | Xq28-CGA high |
| SCN9A\|6335 | sodium channel, voltage-gated, type IX, alpha su [symbol] | 4.32 | 2.23E−06 | Xq28-CGA high |
| SCRG1\|11341 | stimulator of chondrogenesis 1 | 5.17 | 1.12E−04 | Xq28-CGA high |
| SCRN1\|9805 | secemin 1 | 4.15 | 6.09E−07 | Xq28-CGA high |
| SEMA3E\|9723 | sema domain, immunoglobulin domain (Ig), sho [symbol] | 9.39 | 5.40E−09 | Xq28-CGA high |
| SERPINA5\|5104 | serpin peptidase inhibitor, clade A (alpha-1 antip [symbol] | 6.08 | 1.42E−07 | Xq28-CGA high |
| SH2D6\|284948 | SH2 domain containing 6 | 2.21 | 3.12E−06 | Xq28-CGA high |
| SHROOM3\|57619 | shroom family member 3 | 4.64 | 1.46E−08 | Xq28-CGA high |
| SKAP1\|8631 | src kinase associated phosphoprotein 1 | 3.16 | 7.20E−05 | Xq28-CGA high |
| SLC10A4\|201780 | solute carrier family 10, member 4 | 2.53 | 1.80E−09 | Xq28-CGA high |
| SLC15A2\|6565 | solute carrier family 15 (oligopeptide transporte [symbol] | 2.31 | 1.64E−08 | Xq28-CGA high |
| SLC18A1\|6570 | solute carrier family 18 (vesicular monoamine tr [symbol] | 2.12 | 7.98E−05 | Xq28-CGA high |
| SLC22A13\|9390 | solute carrier family 22 (organic anion/urate trar [symbol] | 2.42 | 7.74E−05 | Xq28-CGA high |
| SLC23A3\|151295 | solute carrier family 23, member 3 | 2.14 | 9.02E−07 | Xq28-CGA high |
| SLC26A4\|5172 | solute carrier family 26 (anion exchanger), mem [symbol] | 3.23 | 4.85E−07 | Xq28-CGA high |
| SLC26A7\|115111 | solute carrier family 26 (anion exchanger), mem [symbol] | 2.43 | 3.31E−05 | Xq28-CGA high |
| SLC30A8\|160026 | solute carrier family 30 (zinc transporter), memb [symbol] | 5.18 | 1.88E−13 | Xq28-CGA high |
| SLC44A5\|204962 | solute carrier family 44, member 5 | 4.46 | 1.06E−08 | Xq28-CGA high |
| SLC5A12\|159963 | solute carrier family 5 (sodium/monocarboxylat [symbol] | 4.14 | 3.14E−12 | Xq28-CGA high |
| SLC6A13\|6540 | solute carrier family 6 (neurotransmitter transpo [symbol] | 2.08 | 2.53E−05 | Xq28-CGA high |
| SLC9A11\|284525 | solute carrier family 9, member C2 (putative) | 3.07 | 5.28E−08 | Xq28-CGA high |
| SLCO1A2\|6579 | solute carrier organic anion transporter family, n [symbol] | 18.61 | 2.14E−18 | Xq28-CGA high |
| SMC1B\|27127 | structural maintenance of chromosomes 1B | 2.52 | 3.15E−06 | Xq28-CGA high |
| SMEK3P\|139420 | SMEK homolog 3, suppressor of mek1 (Dictyoste [symbol] | 3.05 | 3.36E−17 | Xq28-CGA high |
| SMYD1\|150572 | SET and MYND domain containing 1 | 3.11 | 7.47E−08 | Xq28-CGA high |
| SOHLH1\|402381 | spermatogenesis and oogenesis specific basic he [symbol] | 3.48 | 8.79E−07 | Xq28-CGA high |
| SORL1\|6653 | sortilin-related receptor, L(DLR class) A repeats [symbol] | 2.27 | 2.39E−05 | Xq28-CGA high |
| SOSTDC1\|25928 | sclerostin domain containing 1 | 5.8 | 4.30E−05 | Xq28-CGA high |
| SP140L\|93349 | SP140 nuclear body protein-like | 2.23 | 1.21E−10 | Xq28-CGA high |
| SPAG17\|200162 | sperm associated antigen 17 | 2.04 | 4.74E−06 | Xq28-CGA high |
| SPAG4\|6676 | sperm associated antigen 4 | 2.37 | 2.61E−07 | Xq28-CGA high |
| SPATA17\|128153 | spermatogenesis associated 17 | 2.17 | 4.63E−06 | Xq28-CGA high |
| SPERT\|220082 | spermatid associated | 3.05 | 6.01E−06 | Xq28-CGA high |
| SPP1\|6696 | secreted phosphoprotein 1 | 3.57 | 1.36E−07 | Xq28-CGA high |
| SPRY4\|81848 | sprouty homolog 4 (Drosophila) | 2.46 | 4.90E−07 | Xq28-CGA high |
| SSX1\|6756 | synovial sarcoma, X breakpoint 1 | 11.7 | 1.86E−06 | Xq28-CGA high |
| SSX2\|6757 | synovial sarcoma, X breakpoint 2 | 28.85 | 6.07E−22 | Xq28-CGA high |
| SSX5\|6758 | synovial sarcoma, X breakpoint 5 | 7.49 | 3.80E−06 | Xq28-CGA high |
| SSX6\|280657 | synovial sarcoma, X breakpoint 6 (pseudogene) | 5.71 | 1.61E−06 | Xq28-CGA high |
| ST6GALNAC5\|81849 | ST6 (alpha-N-acetyl-neuraminyl-2,3-beta-galact [symbol] | 4.3 | 9.70E−07 | Xq28-CGA high |
| STARD4\|134429 | StAR-related lipid transfer (START) domain conta [symbol] | 2.15 | 4.31E−05 | Xq28-CGA high |
| STK31\|56164 | serine/threonine kinase 31 | 7.76 | 2.18E−11 | Xq28-CGA high |
| STK33\|65975 | serine/threonine kinase 33 | 2.69 | 4.34E−05 | Xq28-CGA high |
| SUMO4\|387082 | small ubiquitin-like modifier 4 | 2.18 | 2.64E−07 | Xq28-CGA high |
| SV2A\|9900 | synaptic vesicle glycoprotein 2A | 6.7 | 2.15E−12 | Xq28-CGA high |
| SYT1\|6857 | synaptotagmin I | 3.35 | 1.97E−08 | Xq28-CGA high |
| SYTL5\|94122 | synaptotagmin-like 5 | 5.5 | 9.53E−07 | Xq28-CGA high |
| TAGLN3\|29114 | transgelin 3 | 3.39 | 2.57E−06 | Xq28-CGA high |
| TAS2R19\|259294 | taste receptor, type 2, member 19 | 2.03 | 5.58E−05 | Xq28-CGA high |
| TCL6\|27004 | T-cell leukemia/lymphoma 6 (non-protein coding [symbol] | 18.82 | 2.79E−16 | Xq28-CGA high |
| TEKT2\|27285 | tektin 2 (testicular) | 2.94 | 3.62E−08 | Xq28-CGA high |
| TFDP3\|51270 | transcription factor Dp family, member 3 | 3.27 | 2.47E−06 | Xq28-CGA high |
| TF\|7018 | transferrin | 3.99 | 1.41E−04 | Xq28-CGA high |
| TIGD4\|201798 | tigger transposable element derived 4 | 2.31 | 1.27E−08 | Xq28-CGA high |
| TKTL2\|84076 | transketolase-like 2 | 2.13 | 4.05E−11 | Xq28-CGA high |
| TMEM195\|392636 | alkylglycerol monooxygenase | 5.68 | 1.19E−05 | Xq28-CGA high |
| TMEM22\|80723 | solute carrier family 35, member G2 | 2.26 | 8.89E−05 | Xq28-CGA high |
| TMEM25\|84866 | transmembrane protein 25 | 2.95 | 2.50E−05 | Xq28-CGA high |
| TMEM84\|283673 | | 4.13 | 3.13E−07 | Xq28-CGA high |
| TMPRSS5\|80975 | transmembrane protease, serine 5 | 2.07 | 4.57E−07 | Xq28-CGA high |
| TP53TG3B\|729355 | TP53 target 3B | 2.47 | 6.05E−06 | Xq28-CGA high |
| TPD52L1\|7164 | tumor protein D52-like 1 | 3.17 | 1.31E−07 | Xq28-CGA high |
| TPTE2P1\|646405 | transmembrane phosphoinositide 3-phosphatas [symbol] | 2.68 | 1.82E−05 | Xq28-CGA high |
| TPTE\|7179 | transmembrane phosphatase with tensin homo [symbol] | 62.08 | 1.22E−24 | Xq28-CGA high |
| TRIM17\|51127 | tripartite motif containing 17 | 2.99 | 8.69E−09 | Xq28-CGA high |
| TRIM36\|55521 | tripartite motif containing 36 | 2.06 | 9.96E−06 | Xq28-CGA high |
| TRIM54\|57159 | tripartite motif containing 54 | 2.95 | 3.90E−06 | Xq28-CGA high |
| TRIM6\|117854 | tripartite motif containing 6 | 2.29 | 4.44E−06 | Xq28-CGA high |
| TRIM9\|114088 | tripartite motif containing 9 | 2.23 | 2.74E−06 | Xq28-CGA high |
| TRPM3\|80036 | transient receptor potential cation channel, sub [symbol] | 3.46 | 6.67E−06 | Xq28-CGA high |
| TSNAX-DISC1\|100303 [symbol] | TSNAX-DISC1 readthrough (NMD candidate) | 4.38 | 1.43E−04 | Xq28-CGA high |
| TSPAN5\|10098 | tetraspanin 5 | 2.06 | 2.45E−05 | Xq28-CGA high |
| TTLL7\|79739 | tubulin tyrosine ligase-like family, member 7 | 2.28 | 0.00013952 | Xq28-CGA high |
| TUBA3C\|7278 | tubulin, alpha 3c | 12.67 | 4.33E−16 | Xq28-CGA high |
| UGT2A1\|10941 | UDP glucuronosyltransferase 2 family, polypepti [symbol] | 2.06 | 4.25E−09 | Xq28-CGA high |
| UGT8\|7368 | UDP glycosyltransferase 8 | 5.41 | 2.21E−09 | Xq28-CGA high |
| UNC80\|285175 | unc-80 homolog (C. elegans) | 2.57 | 1.40E−06 | Xq28-CGA high |
| VCX3A\|51481 | variable charge, X-linked 3A | 19.16 | 1.39E−20 | Xq28-CGA high |
| VCX3B\|425054 | variable charge, X-linked 3B | 5.79 | 1.15E−13 | Xq28-CGA high |
| VCX\|26609 | variable charge, X-linked | 13.04 | 4.05E−14 | Xq28-CGA high |
| VWDE\|221806 | von Willebrand factor D and EGF domains | 2.35 | 4.27E−06 | Xq28-CGA high |
| WDR52\|55779 | | 2.03 | 1.31E−06 | Xq28-CGA high |
| WISP3\|8838 | WNT1 inducible signaling pathway protein 3 | 2.47 | 2.26E−06 | Xq28-CGA high |
| WNK4\|65266 | WNK lysine deficient protein kinase 4 | 3.12 | 2.06E−05 | Xq28-CGA high |
| XAGE1D\|9503 | X antigen family, member 1D | 19239.33 | 1.24E−29 | Xq28-CGA high |
| XIRP2\|129446 | xin actin-binding repeat containing 2 | 2.56 | 1.64E−06 | Xq28-CGA high |
| XIST\|7503 | X inactive specific transcript (non-protein coding [symbol] | 21.76 | 9.36E−06 | Xq28-CGA high |
| XK\|7504 | X-linked Kx blood group (McLeod syndrome) | 2.62 | 3.75E−05 | Xq28-CGA high |
| ZBTB8B\|728116 | zinc finger and BTB domain containing 8B | 3.07 | 3.47E−06 | Xq28-CGA high |
| ZIC1\|7545 | Zic family member 1 | 2.51 | 6.91E−05 | Xq28-CGA high |
| ZNF157\|7712 | zinc finger protein 157 | 2.84 | 4.19E−09 | Xq28-CGA high |
| ZNF214\|7761 | zinc finger protein 214 | 2.73 | 1.45E−04 | Xq28-CGA high |
| ZNF229\|7772 | zinc finger protein 229 | 3.24 | 1.34E−07 | Xq28-CGA high |
| ZNF280A\|129025 | zinc finger protein 280A | 4.77 | 1.54E−11 | Xq28-CGA high |
| ZNF300\|91975 | zinc finger protein 300 | 3.32 | 3.73E−10 | Xq28-CGA high |
| ZNF334\|55713 | zinc finger protein 334 | 5.34 | 1.99E−07 | Xq28-CGA high |
| ZNF541\|84215 | zinc finger protein 541 | 2.08 | 3.32E−06 | Xq28-CGA high |
| ZNF556\|80032 | zinc finger protein 556 | 5.97 | 6.11E−08 | Xq28-CGA high |
| ZNF560\|147741 | zinc finger protein 560 | 29.67 | 1.43E−13 | Xq28-CGA high |
| ZNF595\|152687 | zinc finger protein 595 | 9.28 | 4.47E−18 | Xq28-CGA high |
| ZNF648\|127665 | zinc finger protein 648 | 4.46 | 1.27E−07 | Xq28-CGA high |
| ZNF660\|285349 | zinc finger protein 660 | 3.17 | 7.07E−06 | Xq28-CGA high |
| ZNF695\|57116 | zinc finger protein 695 | 2.98 | 1.12E−05 | Xq28-CGA high |
| ZNF883\|169834 | zinc finger protein 883 | 5.3 | 1.04E−10 | Xq28-CGA high |
| ZSCAN12P1\|221584 | zinc finger and SCAN domain containing 12 pseu [symbol] | 3.43 | 2.36E−07 | Xq28-CGA high |
| ZSCAN23\|222696 | zinc finger and SCAN domain containing 23 | 3.3 | 3.28E−05 | Xq28-CGA high |
| ADAMTS2\|9509 | ADAM metallopeptidase with thrombospondin t [symbol] | 2.25 | 3.02E−05 | Xq28-CGA low |
| ADARB2\|105 | adenosine deaminase, RNA-specific, B2 (non-fun [symbol] | 3.51 | 1.54E−05 | Xq28-CGA low |
| ADCY2\|108 | adenylate cyclase 2 (brain) | 12.12 | 1.54E−05 | Xq28-CGA low |
| ADRA2C\|152 | adrenoceptor alpha 2C | 4 | 6.20E−05 | Xq28-CGA low |
| AP3B2\|8120 | adaptor-related protein complex 3, beta 2 subun [symbol] | 2.33 | 1.80E−05 | Xq28-CGA low |
| ARHGAP8\|23779 | Rho GTPase activating protein 8 | 3.71 | 8.66E−08 | Xq28-CGA low |
| ARHGEF4\|50649 | Rho guanine nucleotide exchange factor (GEF) 4 | 3.29 | 2.17E−06 | Xq28-CGA low |
| ARSI\|340075 | arylsulfatase family, member I | 2.33 | 9.24E−05 | Xq28-CGA low |
| ATP1A3\|478 | ATPase, Na+/K+ transporting, alpha 3 polypeptid [symbol] | 2.75 | 1.32E−04 | Xq28-CGA low |
| B3GAT1\|27087 | beta-1,3-glucuronyltransferase 1 (glucuronosyltr [symbol] | 4.79 | 2.81E−04 | Xq28-CGA low |
| BIK\|638 | BCL2-interacting killer (apoptosis-inducing) | 2.48 | 3.49E−05 | Xq28-CGA low |
| BRSK2\|9024 | BR serine/threonine kinase 2 | 6.57 | 2.24E−08 | Xq28-CGA low |
| C10orf116\|10974 | | 2.03 | 1.21E−04 | Xq28-CGA low |
| C10orf93\|255352 | | 8.71 | 1.13E−07 | Xq28-CGA low |
| C15orf59\|388135 | | 2.63 | 2.96E−07 | Xq28-CGA low |
| C21orf121\|150142 | | 2.23 | 1.38E−05 | Xq28-CGA low |
| C5orf38\|153571 | | 16.07 | 9.72E−11 | Xq28-CGA low |
| CACNA1B\|774 | calcium channel, voltage-dependent, N type, alp [symbol] | 2.79 | 7.72E−05 | Xq28-CGA low |
| CACNA1H\|8912 | calcium channel, voltage-dependent, T type, alp [symbol] | 2.99 | 1.56E−09 | Xq28-CGA low |
| CAPG\|822 | capping protein (actin filament), gelsolin-like | 2.73 | 8.59E−06 | Xq28-CGA low |
| CBFA2T3\|863 | core-binding factor, runt domain, alpha subunit [symbol] | 2.07 | 7.68E−05 | Xq28-CGA low |
| CCDC64\|92558 | coiled-coil domain containing 64 | 2.34 | 5.12E−05 | Xq28-CGA low |
| CDHR1\|92211 | cadherin-related family member 1 | 2.47 | 3.35E−06 | Xq28-CGA low |
| CEBPA\|1050 | CCAAT/enhancer binding protein (C/EBP), alpha | 2.01 | 2.45E−06 | Xq28-CGA low |
| CHRFAM7A\|89832 | CHRNA7 (cholinergic receptor, nicotinic, alpha 7 [symbol] | 2.79 | 3.51E−04 | Xq28-CGA low |
| CHRNA7\|1139 | cholinergic receptor, nicotinic, alpha 7 (neurona [symbol] | 3.79 | 1.01E−07 | Xq28-CGA low |
| CIDEA\|1149 | cell death-inducing DFFA-like effector a | 5.47 | 0.000131166 | Xq28-CGA low |
| CPNE7\|27132 | copine VII | 3.07 | 7.29E−07 | Xq28-CGA low |
| CYS1\|192668 | cystin 1 | 2.53 | 1.72E−06 | Xq28-CGA low |
| DARC\|2532 | | 2.1 | 4.54E−05 | Xq28-CGA low |
| DGCR5\|26220 | DiGeorge syndrome critical region gene 5 (non-p [symbol] | 4.08 | 3.25E−10 | Xq28-CGA low |
| DKFZp779M0652\|374387 | | 2.25 | 1.43E−08 | Xq28-CGA low |
| DMRT2\|10655 | doublesex and mab-3 related transcription facto [symbol] | 3.59 | 5.31E−05 | Xq28-CGA low |
| DOC2B\|8447 | double C2-like domains, beta | 2.14 | 2.60E−04 | Xq28-CGA low |
| DPYSL4\|10570 | dihydropyrimidinase-like 4 | 2.48 | 9.03E−05 | Xq28-CGA low |
| DUSP8\|1850 | dual specificity phosphatase 8 | 2.02 | 0.000253945 | Xq28-CGA low |
| DYNLRB2\|83657 | dynein, light chain, roadblock-type 2 | 2.15 | 6.20E−05 | Xq28-CGA low |
| EMID2\|136227 | collagen, type XXVI, alpha 1 | 2.74 | 2.90E−07 | Xq28-CGA low |
| FAM171A1\|221061 | family with sequence similarity 171, member A1 | 2.19 | 0.000114552 | Xq28-CGA low |
| FAM19A5\|25817 | family with sequence similarity 19 (chemokine ( [symbol] | 5.61 | 5.22E−06 | Xq28-CGA low |
| FIBCD1\|84929 | fibrinogen C domain containing 1 | 3.2 | 4.22E−05 | Xq28-CGA low |
| FOXF2\|2295 | forkhead box F2 | 2.38 | 4.92E−05 | Xq28-CGA low |
| FOXQ1\|94234 | forkhead box Q1 | 2.15 | 9.40E−05 | Xq28-CGA low |
| FZD8\|8325 | frizzled class receptor 8 | 2.12 | 2.84E−04 | Xq28-CGA low |
| GABBR2\|9568 | gamma-aminobutyric acid (GABA) B receptor, 2 | 2.41 | 4.17E−08 | Xq28-CGA low |
| GABRA5\|2558 | gamma-aminobutyric acid (GABA) A receptor, al [symbol] | 4.93 | 2.66E−07 | Xq28-CGA low |
| GABRG3\|2567 | gamma-aminobutyric acid (GABA) A receptor, ga [symbol] | 12.79 | 9.85E−05 | Xq28-CGA low |
| GAS6\|2621 | growth arrest-specific 6 | 2.23 | 7.12E−07 | Xq28-CGA low |
| GCNT4\|51301 | glucosaminyl (N-acetyl) transferase 4, core 2 | 2.51 | 1.70E−05 | Xq28-CGA low |
| GMPR\|2766 | guanosine monophosphate reductase | 3.05 | 1.49E−05 | Xq28-CGA low |
| GNAL\|2774 | guanine nucleotide binding protein (G protein), [symbol] | 4.64 | 1.17E−09 | Xq28-CGA low |
| GNAO1\|2775 | guanine nucleotide binding protein (G protein), [symbol] | 2.9 | 1.15E−04 | Xq28-CGA low |
| GOLGA7B\|401647 | golgin A7 family, member B | 2.13 | 0.000106118 | Xq28-CGA low |
| GRID1\|2894 | glutamate receptor, ionotropic, delta 1 | 2.51 | 9.48E−10 | Xq28-CGA low |
| GSG1L\|146395 | GSG1-like | 3.08 | 2.72E−06 | Xq28-CGA low |
| HAR1A\|768096 | highly accelerated region 1A (non-protein coding [symbol] | 3.32 | 5.76E−12 | Xq28-CGA low |
| HAR1B\|768097 | highly accelerated region 1B (non-protein coding [symbol] | 3.57 | 1.45E−10 | Xq28-CGA low |
| HCN2\|610 | hyperpolarization activated cyclic nucleotide-gat [symbol] | 2.25 | 1.88E−04 | Xq28-CGA low |
| HRH3\|11255 | histamine receptor H3 | 2.92 | 8.37E−07 | Xq28-CGA low |
| HS3ST2\|9956 | heparan sulfate (glucosamine) 3-O-sulfotransfer [symbol] | 3.09 | 1.23E−05 | Xq28-CGA low |
| HSPB8\|26353 | heat shock 22 kDa protein 8 | 3.83 | 1.67E−05 | Xq28-CGA low |
| HUNK\|30811 | hormonally up-regulated Neu-associated kinase | 2.82 | 0.000262353 | Xq28-CGA low |
| IRX1\|79192 | iroquois homeobox 1 | 6.16 | 2.43E−06 | Xq28-CGA low |
| IRX2\|153572 | iroquois homeobox 2 | 9.36 | 1.54E−10 | Xq28-CGA low |
| ITGB1BP3\|27231 | nicotinamide riboside kinase 2 | 6.72 | 2.16E−06 | Xq28-CGA low |
| KCNH4\|23415 | potassium voltage-gated channel, subfamily H (e [symbol] | 2.45 | 1.31E−06 | Xq28-CGA low |
| KIAA1543\|57662 | calmodulin regulated spectrin-associated protei [symbol] | 3.57 | 1.60E−06 | Xq28-CGA low |
| KIF1A\|547 | kinesin family member 1A | 3.31 | 2.82E−05 | Xq28-CGA low |
| KIF26A\|26153 | kinesin family member 26A | 3.24 | 9.53E−15 | Xq28-CGA low |
| KNDC1\|85442 | kinase non-catalytic C-lobe domain (KIND) conta [symbol] | 7.08 | 5.98E−16 | Xq28-CGA low |
| L1CAM\|3897 | L1 cell adhesion molecule | 3.61 | 1.67E−04 | Xq28-CGA low |
| LCE2A\|353139 | late cornified envelope 2A | 5.9 | 2.62E−04 | Xq28-CGA low |
| LIMS2\|55679 | LIM and senescent cell antgen-like domains 2 | 2.04 | 8.94E−06 | Xq28-CGA low |
| LOC100127888\|100127888 | | 2.11 | 2.25E−04 | Xq28-CGA low |
| LOC284837\|284837 | | 2.08 | 2.81E−06 | Xq28-CGA low |
| LOC338651\|338651 | | 2.69 | 8.61E−07 | Xq28-CGA low |
| LOC389458\|389458 | | 2.08 | 2.38E−04 | Xq28-CGA low |
| LOC440925\|440925 | | 2.4 | 6.65E−05 | Xq28-CGA low |
| LOC80054\|80054 | | 2.14 | 2.35E−08 | Xq28-CGA low |
| LONRF3\|79836 | LON peptidase N-terminal domain and ring finge [symbol] | 2.61 | 2.90E−05 | Xq28-CGA low |
| LRRC26\|389816 | leucine rich repeat containing 26 | 4.44 | 4.41E−05 | Xq28-CGA low |
| LTF\|4057 | lactotransferrin | 2.53 | 0.000291253 | Xq28-CGA low |
| MAGED4B\|81557 | melanoma antigen family D, 4B | 4.16 | 5.73E−05 | Xq28-CGA low |
| MAGED4\|728239 | melanoma antigen family D, 4 | 4.37 | 6.71E−05 | Xq28-CGA low |
| MATK\|4145 | megakaryocyte-associated tyrosine kinase | 2.86 | 9.34E−07 | Xq28-CGA low |
| MC1R\|4157 | melanocortin 1 receptor (alpha melanocyte stim [symbol] | 2.42 | 3.56E−05 | Xq28-CGA low |
| MEGF6\|1953 | multiple EGF-like-domains 6 | 4.12 | 9.53E−12 | Xq28-CGA low |
| MEIS3\|56917 | Meis homeobox 3 | 2.14 | 1.80E−04 | Xq28-CGA low |
| MNX1\|3110 | motor neuron and pancreas homeobox 1 | 7.94 | 5.05E−07 | Xq28-CGA low |
| NPDC1\|56654 | neural proliferation, differentiation and control, [symbol] | 2.07 | 7.67E−05 | Xq28-CGA low |
| NPTXR\|23467 | neuronal pentraxin receptor | 3.04 | 1.35E−05 | Xq28-CGA low |
| NTN1\|9423 | netrin 1 | 3.61 | 1.47E−08 | Xq28-CGA low |
| NTNG2\|84628 | netrin G2 | 2.41 | 5.55E−08 | Xq28-CGA low |
| OCA2\|4948 | oculocutaneous albinism II | 21.65 | 1.15E−05 | Xq28-CGA low |
| OLFM1\|10439 | olfactomedin 1 | 14.79 | 1.59E−15 | Xq28-CGA low |
| OTUD7A\|161725 | OTU deubiquitinase 7A | 2.61 | 1.09E−07 | Xq28-CGA low |
| PANX2\|56666 | pannexin 2 | 3.37 | 4.51E−07 | Xq28-CGA low |
| PCBP3\|54039 | poly(rC) binding protein 3 | 3.31 | 1.77E−06 | Xq28-CGA low |
| PDE9A\|5152 | phosphodiesterase 9A | 5.8 | 8.69E−09 | Xq28-CGA low |
| PGBD5\|79605 | piggyBac transposable element derived 5 | 2.11 | 1.56E−06 | Xq28-CGA low |
| PHF21B\|112885 | PHD finger protein 21B | 3.98 | 3.59E−06 | Xq28-CGA low |
| PHYHD1\|254295 | phytanoyl-CoA dioxygenase domain containing [symbol] | 2.25 | 5.66E−05 | Xq28-CGA low |
| PLAC2\|257000 | tissue differentiation-indudng non-protein codin [symbol] | 6.62 | 1.05E−07 | Xq28-CGA low |
| PMEPA1\|56937 | prostate transmembrane protein, androgen indu [symbol] | 2.1 | 5.96E−05 | Xq28-CGA low |
| PNMA6A\|84968 | paraneoplastic Ma antigen family member 6A | 3.11 | 4.76E−08 | Xq28-CGA low |
| PRODH\|5625 | proline dehydrogenase (oxidase) 1 | 3 | 5.90E−06 | Xq28-CGA low |
| PRR5-ARHGAP8\|5531 [symbol] | PRR5-ARHGAP8 readthrough | 9.56 | 2.42E−05 | Xq28-CGA low |
| PTK6\|5753 | protein tyrosine kinase 6 | 2.93 | 2.17E−06 | Xq28-CGA low |
| RADIL\|55698 | Ras association and DIL domains | 4.59 | 1.96E−08 | Xq28-CGA low |
| RPS6KA2\|6196 | ribosomal protein S6 kinase, 90 kDa, polypeptide [symbol] | 2.38 | 1.22E−05 | Xq28-CGA low |
| SDK1\|221935 | sidekick cell adhesion molecule 1 | 2.27 | 8.66E−06 | Xq28-CGA low |
| SFTPD\|6441 | surfactant protein D | 2.12 | 0.000262896 | Xq28-CGA low |
| SH3GL2\|6456 | SH3-domain GRB2-like 2 | 4.54 | 2.12E−04 | Xq28-CGA low |
| SIGLEC8\|27181 | sialic acid binding Ig-like lectin 8 | 2.58 | 0.000344343 | Xq28-CGA low |
| SLC16A6\|9120 | solute carrier family 16, member 6 | 4.38 | 2.79E−06 | Xq28-CGA low |
| SLC24A4\|123041 | solute carrier family 24 (sodium/potassium/calci [symbol] | 3.39 | 3.08E−05 | Xq28-CGA low |
| SLC39A12\|221074 | solute carrier family 39 (zinc transporter), memb [symbol] | 2.2 | 0.000277556 | Xq28-CGA low |
| SLPI\|6590 | secretory leukocyte peptidase inhibitor | 3.31 | 0.000158902 | Xq28-CGA low |
| SNCB\|6620 | synuclein, beta | 2.2 | 0.000254582 | Xq28-CGA low |
| SOX1\|6656 | SRY (sex determining region Y)-box 1 | 7.73 | 1.18E−08 | Xq28-CGA low |
| SP5\|389058 | Sp5 transcription factor | 2.72 | 7.66E−05 | Xq28-CGA low |
| SYNC\|81493 | syncoilin, intermediate filament protein | 2.17 | 1.99E−05 | Xq28-CGA low |
| TCERG1L\|256536 | transcription elongation regulator 1-like | 2.67 | 1.42E−04 | Xq28-CGA low |
| TFF3\|7033 | trefoil factor 3 (intestinal) | 4.18 | 1.26E−06 | Xq28-CGA low |
| TMPRSS13\|84000 | transmembrane protease, serine 13 | 6.69 | 6.70E−09 | Xq28-CGA low |
| TWIST2\|117581 | twist family bHLH transcription factor 2 | 3.28 | 7.49E−07 | Xq28-CGA low |
| USP43\|124739 | ubiquitin specific peptidase 43 | 6.39 | 4.55E−08 | Xq28-CGA low |
| VIPR1\|7433 | vasoactive intestinal peptide receptor 1 | 2.1 | 0.000161869 | Xq28-CGA low |
| WNT9B\|7484 | wingless-type MMTV integration site family, me [symbol] | 3.67 | 3.57E−06 | Xq28-CGA low |
| ZNF423\|23090 | zinc finger protein 423 | 2.29 | 3.19E−06 | Xq28-CGA low |

[symbol]

indicates data missing or illegible when filed

TABLE 4
Overlapping genes between no benefit/clinical benefit groups and TCGA Xq28-CGA-high/low subsets

| | TCCGA Xq28-CGA high | TCCGA Xq28-CGA low |
|---|---|---|
| | (n = 559) | (n = 130) |
| No benefit | ABCA8, AKAP6, ANGPT1, ANKFN1, ANKRD20A3, ANKRD20A4, | 0 |
| (n = 975) | ANKRD45, ANKRD7, ANO3, ATP1B2, B3GALNT1, C12orf56, C1QTNF3, | |
| | C21orf90, C2orf66, C3orf30, C4orf19, CABP4, CADM4, CASP12, CCDC136, | |
| | CFHR4, CFI, CNDP1, CSAG1, CSAG2, CSAG3, CYP26A1, DCAF4L2, DDX25, | |
| | EFHC2, EGF, ELOVL2, EYA1, FAM106A, FAM81B, FGF2, FRAS1, | |
| | GABRA3, GABRB1, GABRG2, GABRQ, GAGE12D, GALNT8, GAP43, GDNF, | |
| | GNGT1, GPR158, GRIA2, GYPE, HHATL, HMGA2, HOXA2, HOXA3, HOXD10, | |
| | HOXD11, HOXD13, IGFN1, IL13RA2, ISL2, KCNC2, KCNJ10, KCNMB2, | |
| | KLF17, KLHL13, LCTL, LGALS12, LMOD2, LRP4, MAGEA1, MAGEA11, | |
| | MAGEA12, MAGEA2, MAGEA3, MAGEA6, MAGEA8, | |
| | MAGEA9B, MAGEB2, MAGEC1, MAGEC2, MAGEC3, MEGF10, | |
| | MMEL1, MMP16, MRGPRX3, MYH13, NEB, NECAB1, NLRP4, NPY6R, NXPH1, | |
| | OLFM3, OR56B4, PCDHB18, PCSK1, PEX5L, PI15, PLAC1, POU5F1B, PPP1R1C, | |
| | PPP1R9A, PSG9, RAPGEF4, RBM20, RFPL4B, RND2, SCN2A, SERPINA5, | |
| | SLC10A4, SLC18A1, SLC30A3, SLCO1A2, SOSTDC1, SPAG17, | |
| | SPP1, SPRY4, SSX6, SV2A, SYT1, SYTL5, TEKT2, TPD52L1, | |
| | TRIM9, TRPM3, TSPAN5, WNK4, XIRP2, XIST, ZNF334, ZNF541 | |
| Clinical benefit | 0 | ADCY2, ATP1A3, BIK, C5orf38, CPNE7, |
| (n = 428) | | GOLGA7B, HS3ST2, IRX2, LRRC26, |
| | | MNX1, SIGLEC8, SLC24A4, USP43 |

[0504] The following references were cited in this specification.

### REFERENCES

[0505] Anders, S., Pyl, P. T., and Huber, W. (2015). HTSeq—a Python framework to work with highthroughput sequencing data. Bioinformatics (Oxford, England) 31, 166-169.
[0506] Angelova, M., Charoentong, P., Hackl, H., Fischer, M. L., Snajder, R., Krogsdam, A. M., Waldner, M. J., Bindea, G., Mlecnik, B., Galon, J., et al. (2015). Characterization of the immunophenotypes and antigenomes of colorectal cancers reveals distinct tumor escape mechanisms and novel targets for immunotherapy. Genome biology 16, 64.
[0507] Apetoh, L., Ghiringhelli, F., Tesniere, A., Obeid, M., Ortiz, C., Criollo, A., Mignot, G., Maiuri, M. C., Ullrich, E., Saulnier, P., et al. (2007). Toll-like receptor 4-dependent contribution of the immune system to anticancer chemotherapy and radiotherapy. Nat Med 13, 1050-1059.
[0508] Avalos, A. M., Kiefer, K., Tian, J., Christensen, S., Shlomchik, M., Coyle, A. J., and Marshak-Rothstein, A. (2010). RAGE-independent autoreactive B cell activation in response to chromatin and HMGB1/DNA immune complexes. Autoimmunity 43, 103-110.
[0509] Aimi, F., Scolyer, R. A., Rumcheva, P., Moncrieff, M., Murali, R., McCarthy, S. W., Saw, R. P., and Thompson, J. F. (2012). Tumor-infiltrating lymphocyte grade is an independent predictor of sentinel lymph node status and survival in patients with cutaneous melanoma. Journal of clinical oncology: official journal of the American Society of Clinical Oncology 30, 2678-2683.
[0510] Barrow, C., Browning, J., MacGregor, D., Davis, I. D., Sturrock, S., Jungbluth, A. A., and Cebon, J. (2006). Tumor antigen expression in melanoma varies according to antigen and stage. Clin Cancer Res 12, 764-771.
[0511] Bredenbeck, A., Hollstein, V. M., Trefzer, U., Sterry, W., Walden, P., and Losch, F. O. (2008). Coordinated expression of clustered cancer/testis genes encoded in a large inverted repeat DNA structure. Gene 415, 68-73.
[0512] Cancer Genome Atlas, N. (2015). Genomic Classification of Cutaneous Melanoma. Cell 161, 1681-1696.
[0513] Carter, S. L., Cibulskis, K., Helman, E., McKenna, A., Shen, H., Zack, T., Laird, P. W., Onofrio, R. C., Winckler, W., Weir, B. A., et al. (2012). Absolute quantification of somatic DNA alterations in human cancer. Nature biotechnology 30, 413-421.
[0514] Chen, Y. T., Panarelli, N. C., Piotti, K. C., and Yantiss, R. K. (2014). Cancer-testis antigen expression in digestive tract carcinomas: frequent expression in esophageal squamous cell carcinoma and its precursor lesions. Cancer immunology research 2, 480-486.
[0515] Coulie, P. G., Van den Eynde, B. J., van der Bruggen, P., and Boon, T. (2014). Tumour antigens recognized by T lymphocytes: at the core of cancer immunotherapy. Nature reviews Cancer 14, 135-146.
[0516] De Plaen, E., Arden, K., Traversari, C., Gaforio, J. J., Szikora, J. P., De Smet, C., Brasseur, F., van der Bruggen, P., Lethe, B., Lurquin, C., et aL (1994). Structure, chromosomal localization, and expression of 12 genes of the MAGE family. Immunogenetics 40, 360-369.
[0517] Dobin, A., Davis, C. A., Schlesinger, F., Drenkow, J., Zaleski, C., Jha, S., Batut, P., Chaisson, M., and Gingeras, T. R. (2013). STAR: ultrafast universal RNA-seq aligner. Bioinformatics (Oxford, England) 29, 15-21.
[0518] Doyle, J. M., Gao, J., Wang, J., Yang, M., and Potts, P. R (2010). MAGE-RING protein complexes comprise a family of E3 ubiquitin ligases. Molecular cell 39, 963-974.
[0519] Galluzzi, L., Buque, A., Kepp, O., Zitvogel, L., and Kroemer, G. (2017). Immunogenic cell death in cancer and infectious disease. Nature reviews Immunology 17, 97-111.
[0520] Gao, J., Shi, L. Z., Zhao, H., Chen, J., Xiong, L., He, Q., Chen, T., Roszik, J., Bernatchez, C., Woodman, S. E, et aL (2016). Loss of IFN-gamma Pathway Genes in Tumor Cells as a Mechanism of Resistance to Anti-CTLA-4 Therapy. Cell 167, 397-404 e399.
[0521] Gumireddy, K., Li, A., Kossenkov, A. V., Sakurai, M., Yan, J., Li, Y., Xu, H., Wang, J., Zhang, P. J., Zhang, L., et al. (2016). The mRNA-edited form of GABRA3 suppresses GABRA3-mediated Akt activation and breast cancer metastasis. Nature communications 7, 10715.
[0522] Hodi, F. S., O'Day, S. J., McDermott, D. F., Weber, R. W., Sosman, J. A., Haanen, J. B., Gonzalez, R., Robert, C., Schadendorf, D., Hassel, J. C., et al. (2010). Improved survival with ipilimumab in patients with metastatic melanoma. N Engl J Med 363, 711-723.
[0523] Hugo, W., Zaretsky, J. M., Sun, L., Song, C., Moreno, B. H., Hu-Lieskovan, S., Berent-Maoz, B., Pang, J., Chmielowski, B., Cherry, G., et aL (2016). Genomic and Transcriptomic Features of Response to Anti-PD-1 Therapy in Metastatic Melanoma. Cell 165, 35-44.
[0524] Ivanov, S., Dragoi, A. M., Wang, X., Dallacosta, C., Louten, J., Musco, G., Sitia, G., Yap, G. S., Wan, Y., Biron, C. A., et al. (2007). A novel role for HMGB1 in TLR9-mediated inflammatory responses to CpG-DNA. Blood 110, 1970-1981.
[0525] Kalluri, R., and Weinberg, R. A. (2009). The basics of epithelial-mesenchymal transition. J Clin Invest 119, 1420-1428.
[0526] Ladoire, S., Penault-Llorca, F., Senovilla, L., Dalban, C., Enot, D., Locher, C., Prada, N., Poirier-Colame, V., Chaba, K., Amould, L., et al. (2015). Combined evaluation of LC3B puncta and HMGB1 expression predicts residual risk of relapse after adjuvant chemotherapy in breast cancer. Autophagy 11, 1878-1890.
[0527] Lee, A. K., and Potts, P. R. (2017). A comprehensive guide to the MAGE family of ubiquitin ligases. Journal of molecular biology.
[0528] Li, B., and Dewey, C. N. (2011). RSEM: accurate transcript quantification from RNA-Seq data with or without a reference genome. BMC bioinformatics 12, 323.
[0529] Li, G., Liang, X., and Lotze, M. T. (2013). HMGB1: The Central Cytokine for All Lymphoid Cells. Frontiers in immunology 4, 68.
[0530] Li, Y., Wang, L. X., Yang, G., Hao, F., Urba, W. J., and Hu, H. M. (2008). Efficient crosspresentation depends on autophagy in tumor cells. Cancer research 68, 6889-6895.
[0531] Mi, H., Poudel, S., Muruganujan, A., Casagrande, J. T., and Thomas, P. D. (2016). PANTHER version 10: expanded protein families and functions, and analysis tools. Nucleic acids research 44, D336-342.
[0532] Michaud, M., Martins, I., Sukkurwala, A. Q., Adjemian, S., Ma, Y., Pellegatti, P., Shen, S., Kepp, O., Scoazec, M., Mignot, G., et aL (2011). Autophagy-dependent anticancer immune responses induced by chemotherapeutic agents in mice. Science 334, 1573-1577.
[0533] Palucka, K., and Banchereau, J. (2014). SnapShot: Cancer Vaccines. Cell 157, 516-516 e511. Pedicord, V. A., Montalvo, W., Leiner, I. M., and Allison, J. P. (2011). Single dose of anti-CTLA-4 enhances CD8+ T-cell memory formation, function, and maintenance. Proceedings of the National Academy of Sciences of the United States of America 108, 266-271.
[0534] Pineda, C. T., Ramanathan, S., Fon Tacer, K., Weon, J. L., Potts, M. B., Ou, Y. H., White, M. A., and Potts, P. R. (2015). Degradation of AMPK by a cancer-specific ubiquitin ligase. Cell 160, 715-728.
[0535] Pu, Y., Xu, M., Liang, Y., Yang, K., Guo, Y., Yang, X., and Fu, Y. X. (2016). Androgen receptor antagonists compromise T cell response against prostate cancer leading to early tumor relapse. Science translational medicine 8, 333ra347.
[0536] Riaz, N., Havel, J. J., Kendall, S. M., Makarov, V., Walsh, L. A., Desrichard, A., Weinhold, N., and Chan, T. A. (2016). Recurrent SERPINB3 and SERPINB4 mutations in patients who respond to anti-CTLA4 immunotherapy. Nature genetics 48, 1327-1329.
[0537] Roeder, C., Schuler-Thurner, B., Berchtold, S., Vieth, G., Driesch, P., Schuler, G., and Luftl, M. (2005). MAGE-A3 is a frequent tumor antigen of metastasized melanoma. Archives of dermatological research 296, 314-319.
[0538] Saiag, P., Gutzmer, R., Ascierto, P. A., Maio, M., Grob, J. J., Murawa, P., Dreno, B., Ross, M., Weber, J., Hauschild, A., et aL (2016). Prospective assessment of a gene signature potentially predictive of clinical benefit in metastatic melanoma patients following MAGE-A3 immunotherapeutic (PREDICT). Annals of oncology: official journal of the European Society for Medical Oncology/ESMO 27, 1947-1953.
[0539] Scaffidi, P., Misteli, T., and Bianchi, M. E. (2002). Release of chromatin protein HMGB1 by necrotic cells triggers inflammation. Nature 418, 191-195.
[0540] Simpson, A. J., Caballero, 01., Jungbluth, A., Chen, Y. T., and Old, L. J. (2005). Cancer/testis antigens, gametogenesis and cancer. Nature reviews Cancer 5, 615-625.
[0541] Snyder, A., Makarov, V., Merghoub, T., Yuan, J., Zaretsky, J. M., Desrichard, A., Walsh, L. A., Postow, M. A., Wong, P., Ho, T. S., et al. (2014). Genetic basis for clinical response to CTLA-4 blockade in melanoma. N Engl J Med 371, 2189-2199.
[0542] Tang, D., Kang, R., Coyne, C. B., Zeh, H. J., and Lotze, M. T. (2012). PAMPs and DAMPs: signal Os that spur autophagy and immunity. Immunological reviews 249, 158-175.
[0543] Tang, D., Kang, R., Livesey, K. M., Cheh, C. W., Farkas, A., Loughran, P., Hoppe, G., Bianchi, M. E., Tracey, K. J., Zeh, H. J., 3rd, et al. (2010). Endogenous HMGB1 regulates autophagy. The Journal of cell biology 190, 881-892.
[0544] Tian, J., Avalos, A. M., Mao, S. Y., Chen, B., Senthil, K., Wu, H., Parroche, P., Drabic, S., Golenbock, D., Sirois, C., et al. (2007). Toll-like receptor 9-dependent activation by DNAcontaining immune complexes is mediated by HMGB1 and RAGE. Nat Immunol 8, 487-496.
[0545] Tittarelli, A., Gonzalez, F. E., Pereda, C., Mora, G., Munoz, L., Saffie, C., Garcia, T., Diaz, D., Falcon, C., Hermoso, M., et aL (2012). Toll-like receptor 4 gene polymorphism influences dendritic cell in vitro function and clinical outcomes in vaccinated melanoma patients. Cancer immunology, immunotherapy: CII 61, 2067-2077.
[0546] Van Allen, E. M., Miao, D., Schilling, B., Shukla, S. A., Blank, C., Zimmer, L., Sucker, A., Hillen, U., Foppen, M. H., Goldinger, S. M., et aL (2015). Genomic correlates of response to CTLA-4 blockade in metastatic melanoma. Science 350, 207-211.
[0547] van der Bruggen, P., Traversari, C., Chomez, P., Lurquin, C., De Plaen, E., Van den Eynde, B., Knuth, A., and Boon, T. (1991). A gene encoding an antigen recognized by cytolytic T lymphocytes on a human melanoma. Science 254, 1643-1647.
[0548] Van Der Bruggen, P., Zhang, Y., Chaux, P., Stroobant, V., Panichelli, C., Schultz, E. S., Chapiro, J., Van Den Eynde, B. J., Brasseur, F., and Boon, T. (2002). Tumor-specific shared antigenic peptides recognized by human T cells. Immunological reviews 188, 51-64.
[0549] Vansteenkiste, J. F., Cho, B. C., Vanakesa, T., De Pas, T., Zielinski, M., Kim, M. S., Jassem, J., Yoshimura, M., Dahabreh, J., Nakayama, H., et al. (2016). Efficacy of the MAGE-A3 cancer immunotherapeutic as adjuvant therapy in patients with resected MAGE-A3-positive nonsmall-cell lung cancer (MAGRIT): a randomised, double-blind, placebo-controlled, phase 3 trial. The lancet oncology 17, 822-835.
[0550] Weber, J. S., Gibney, G., Sullivan, R. J., Sosman, J. A., Slingluff, C. L., Jr., Lawrence, D. P., Logan, T. F., Schuchter, L. M., Nair, S., Fecher, L., et aL (2016). Sequential administration of nivolumab and ipilimumab with a planned switch in patients with advanced melanoma (CheckMate 064): an open-label, randomised, phase 2 trial. The lancet oncology 17, 943-955.
[0551] Wolchok, J. D., Kluger, H., Callahan, M. K., Postow, M. A., Rizvi, N. A., Lesokhin, A. M., Segal, N. H., Ariyan, C. E., Gordon, R. A., Reed, K., et al. (2013). Nivolumab plus ipilimumab in advanced melanoma. N Engl J Med 369, 122-133.
[0552] Yanai, H., Ban, T., Wang, Z., Choi, M. K., Kawamura, T., Negishi, H., Nakasato, M., Lu, Y., Hangai, S., Koshiba, R., et aL (2009). HMGB proteins function as universal sentinels for nucleic-acid-mediated innate immune responses. Nature 462, 99-103.
[0553] Yatim, N., Cullen, S., and Albert, M. L. (2017). Dying cells actively regulate adaptive immune responses. Nature reviews Immunology 17, 262-275.
[0554] Yuan, J., Adamow, M., Ginsberg, B. A., Rasalan, T. S., Ritter, E., Gallardo, H. F., Xu, Y., Pogoriler, E., Terzulli, S. L., Kuk, D., et aL (2011). Integrated NY-ESO-1 antibody and CD8+ T-cell responses correlate with clinical benefit in advanced melanoma patients treated with ipilimumab. Proceedings of the National Academy of Sciences of the United States of America 108, 16723-16728.
[0555] Zaretsky, J. M., Garcia-Diaz, A., Shin, D. S., Escuin-Ordinas, H., Hugo, W., Hu-Lieskovan, S., Torrejon, D. Y., Abril-Rodriguez, G., Sandoval, S., Barthly, L., et al. (2016). Mutations Associated with Acquired Resistance to PD-1 Blockade in Melanoma. N Engl J Med 375, 819-829.

### OTHER EMBODIMENTS

[0556] While the invention has been described in conjunction with the detailed description thereof, the foregoing description is intended to illustrate and not limit the scope of the invention, which is defined by the scope of the appended claims. Other aspects, advantages, and modifications are within the scope of the following claims.

[0557] The patent and scientific literature referred to herein establishes the knowledge that is available to those with skill in the art. All United States patents and published or unpublished United States patent applications cited herein are incorporated by reference. All published foreign patents and patent applications cited herein are hereby incorporated by reference. Genbank and NCBI submissions indicated by accession number cited herein are hereby incorporated by reference. All other published references, documents, manuscripts and scientific literature cited herein are hereby incorporated by reference.

[0558] While this invention has been particularly shown and described with references to preferred embodiments thereof, it will be understood by those skilled in the art that various changes in form and details may be made therein without departing from the scope of the invention encompassed by the appended claims.

The application's sequence listing, which the Patent Office published only in electronic form, follows.

SEQUENCE LISTING (211 sequences)

SEQ ID NO: 1 - protein, 314 aa, Homo sapiens
MPLEQRSQHCKPEEGLEARGEALGLVGAQAPATEEQQTASSSSTLVEVTLGEVPAADSPSPPHSPQGASSFSTTINYTLWRQSDEGSSNQEEEGPRMFPDLESEFQAAISRKMVELVHFLLLKYRAREPVTKAEMLESVLRNCQDFFPVIFSKASEYLQLVFGIEVVEVVPISHLYILVTCLGLSYDGLLGDNQVMPKTGLLIIVLAIIAIEGDCAPEEKIWEELSMLEVFEGREDSVFAHPRKLLMQDLVQENYLEYRQVPGSDPACYEFLWGPRALIETSYVKVLHHTLKIGGEPHISYPPLHERALREGEE

SEQ ID NO: 2 - DNA, 1680 bp, Homo sapiens
ttgcgcattggaggtcagaggacagcgagattctcgccctgagcaacggcctgacgtcggcggagggaagcaggcgcaggctccgtgaggaggcaaggcctgtgggtcttcattgcccagctcctgcccgcactcctgcctgctgccctgaccagagtcatcatgcctcttgagcagaggagtcagcactgcaagcctgaagaaggccttgaggcccgaggagaggccctgggcctggtgggtgcgcaggctcctgctactgaggagcagcagaccgcttcttcctcttctactctagtggaagttaccctgggggaggtgcctgctgccgactcaccgagtcctccccacagtcctcagggagcctccagcttctcgactaccatcaactacactctttggagacaatccgatgagggctccagcaaccaagaagaggaggggccaagaatgtttcccgacctggagtccgagttccaagcagcaatcagtaggaagatggttgagttggttcattttctgctcctcaagtatcgagccagggagccggtcacaaaggcagaaatgctggagagtgtcctcagaaattgccaggacttctttcccgtgatcttcagcaaagcctccgagtacttgcagctggtctttggcatcgaggtggtggaagtggtccccatcagccacttgtacatccttgtcacctgcctgggcctctcctacgatggcctgctgggcgacaatcaggtcatgcccaagacaggcctcctgataatcgtcctggccataatcgcaatagagggcgactgtgcccctgaggagaaaatctgggaggagctgagtatgttggaggtgtttgaggggagggaggacagtgtcttcgcacatcccaggaagctgctcatgcaagatctggtgcaggaaaactacctggagtaccggcaggtgcccggcagtgatcctgcatgctacgagttcctgtggggtccaagggccctcattgaaaccagctatgtgaaagtcctgcaccatacactaaagatcggtggagaacctcacatttcctacccacccctgcatgaacgggctttgagagagggagaagagtgagtctcagcacatgttgcagccagggccagtgggagggggtctgggccagtgcaccttccagggccccatccattagcttccactgcctcgtgtgatatgaggcccattcctgcctctttgaagagagcagtcagcattcttagcagtgagtttctgttctgttggatgactttgagatttatctttgtttcctgttggaattgttcaaatgttccttttaacaaatggttggatgaacttcagcatccaagtttatgaatgacagtagtcacacatagtgctgtttatatagtttaggggtaagagtcctgttttttattcagattgggaaatccattccattttgtgagttgtcacataataacagcagtggaatatgtatttgcctatattgtgaacgaattagcagtaaaatacatgatacaaggaactcaaaagatagttaattcttgccttatacctcagtctattatgtaaaattaaaaatatgtgtatgtttttgcttctttgagaatgcaaaagaaattaaatctgaataaataattcttcctgttcaaaaaaaaaaaaaaaaaa

SEQ ID NO: 3 - protein, 314 aa, Homo sapiens
MPLEQRSQHCKPEEGLEARGEALGLVGAQAPATEEQEAASSSSTLVEVTLGEVPAAESPDPPQSPQGASSLPTTMNYPLWSQSYEDSSNQEEEGPSTFPDLESEFQAALSRKVAELVHFLLLKYRAREPVTKAEMLGSVVGNWQYFFPVIFSKASSSLQLVFGIELMEVDPIGHLYIFATCLGLSYDGLLGDNQIMPKAGLLIIVLAIIAREGDCAPEEKIWEELSVLEVFEGREDSILGDPKKLLTQHFVQENYLEYRQVPGSDPACYEFLWGPRALVETSYVKVLHHMVKISGGPHISYPPLHEWVLREGEE

SEQ ID NO: 4 - DNA, 1753 bp, Homo sapiens
gagattctcgccctgagcaacgagcgacggcctgacgtcggcggagggaagccggcccaggctcggtgaggaggcaaggttctgaggggacaggctgacctggaggaccagaggcccccggaggagcactgaaggagaagatctgccagtgggtctccattgcccagctcctgcccacactcccgcctgttgccctgaccagagtcatcatgcctcttgagcagaggagtcagcactgcaagcctgaagaaggccttgaggcccgaggagaggccctgggcctggtgggtgcgcaggctcctgctactgaggagcaggaggctgcctcctcctcttctactctagttgaagtcaccctgggggaggtgcctgctgccgagtcaccagatcctccccagagtcctcagggagcctccagcctccccactaccatgaactaccctctctggagccaatcctatgaggactccagcaaccaagaagaggaggggccaagcaccttccctgacctggagtccgagttccaagcagcactcagtaggaaggtggccgagttggttcattttctgctcctcaagtatcgagccagggagccggtcacaaaggcagaaatgctggggagtgtcgtcggaaattggcagtatttctttcctgtgatcttcagcaaagcttccagttccttgcagctggtctttggcatcgagctgatggaagtggaccccatcggccacttgtacatctttgccacctgcctgggcctctcctacgatggcctgctgggtgacaatcagatcatgcccaaggcaggcctcctgataatcgtcctggccataatcgcaagagagggcgactgtgcccctgaggagaaaatctgggaggagctgagtgtgttagaggtgtttgaggggagggaagacagtatcttgggggatcccaagaagctgctcacccaacatttcgtgcaggaaaactacctggagtaccggcaggtccccggcagtgatcctgcatgttatgaattcctgtggggtccaagggccctcgttgaaaccagctatgtgaaagtcctgcaccatatggtaaagatcagtggaggacctcacatttcctacccacccctgcatgagtgggttttgagagagggggaagagtgagtctgagcacgagttgcagccagggccagtgggagggggtctgggccagtgcaccttccggggccgcatcccttagtttccactgcctcctgtgacgtgaggcccattcttcactctttgaagcgagcagtcagcattcttagtagtgggtttctgttctgttggatgactttgagattattctttgtttcctgttggagttgttcaaatgttccttttaacggatggttgaatgagcgtcagcatccaggtttatgaatgacagtagtcacacatagtgctgtttatatagtttaggagtaagagtcttgttttttactcaaattgggaaatccattccattttgtgaattgtgacataataatagcagtggtaaaagtatttgcttaaaattgtgagcgaattagcaataacatacatgagataactcaagaaatcaaaagatagttgattcttgccttgtacctcaatctattctgtaaaattaaacaaatatgcaaaccaggatttccttgacttctttgagaatgcaagcgaaattaaatctgaataaataattcttcctcttcaaaaaaaaaaaaaaaaaaaaaaaaaaaaaa

SEQ ID NO: 5 - protein, 314 aa, Homo sapiens [sequence omitted]

SEQ ID NO: 6 - DNA, 1753 bp, Homo sapiens; identical to SEQ ID NO: 4

SEQ ID NO: 7 - protein, 314 aa, Homo sapiens
MPLEQRSQHCKPEEGLEAQGEALGLVGAQAPATEEQETASSSSTLVEVTLREVPAAESPSPPHSPQGASTLPTTINYTLWSQSDEGSSNEEQEGPSTFPDLETSFQVALSRKMAELVHFLLLKYRAREPFTKAEMLGSVIRNFQDFFPVIFSKASEYLQLVFGIEVVEVVRIGHLYILVTCLGLSYDGLLGDNQIVPKTGLLIIVLAIIAKEGDCAPEEKIWEELSVLEASDGREDSVFAHPRKLLTQDLVQENYLEYRQVPGSDPACYEFLWGPRALVETSYVKVLHHLLKISGGPHISYPPLHEWAFREGEE

SEQ ID NO: 8 - DNA, 1862 bp, Homo sapiens
aagatgccgagggaggactgaggcgggcctcaccccagacagagggcccccaataatccagcgctgcctctgctgccgggcctggaccaccctgcaggggaagacttctcaggctgagtcgccaccacctcaccccgccaccccccgccgctttaaccgcagggaactctggtatctcagggagttgaggaccttttcttcagagggtgactcaggtcaacacaggggcccccatgtagtcgacagacacagtggtcctaagatctaccaagcatccaggttctgaggagacaggccccggagcagcactagctcctgcccacactcctacctgctgccctgaccagagtcatcatgccacttgagcagaggagtcagcactgcaagcctgaggaaggccttgaggcccaaggagaggccctgggcttggtgggtgcgcaggctcctgctactgaggagcaggagactgcctcctcctcctctactctagtggaagtcaccctgcgggaggtgcctgctgccgagtcaccaagtcctccccacagtcctcagggagcctccaccctccccactaccatcaactatactctctggagtcaatccgatgagggctccagcaacgaagaacaggaagggccaagcacctttcctgacctggagacgagcttccaagtagcactcagtaggaagatggctgagttggttcattttctgctcctcaagtatcgagccagggagccattcacaaaggcagaaatgctggggagtgtcatcagaaatttccaggacttctttcctgtgatcttcagcaaagcctccgagtacttgcagctggtctttggcatcgaggtggtggaagtggtccgcatcggccacttgtacatccttgtcacctgcctgggcctctcctacgatggcctgctgggcgacaatcagatcgtgcccaagacaggcctcctgataatcgtcctggccataatcgcaaaagagggcgactgtgcccctgaggagaaaatctgggaggagctgagtgtgttggaggcatctgatgggagggaggacagtgtctttgcgcatcccaggaagctgctcacccaagatttggtgcaggaaaactacctggagtaccggcaggtccccggcagtgatcctgcatgctacgagttcctgtggggtccaagggccctcgttgaaaccagctatgtgaaagtcctgcaccatttgctaaagatcagtggaggacctcacatttcctacccacccctgcatgaatgggcttttagagagggggaagagtgagtctgagcacgagttgcagccagggccagtgggagggggtctgggccagtgcaccttccaaggccccatccattagtttccactgcctcgtgtgacatgaggcccattcttcactctttgaagagagcagtcagtattgttagtagtgagtttctgttctattggatgactttgagatttatctttgtttcctgttggaattgttcaaatgttccttttaacggatggttgaatgaacttcagcatccaagtttatgaatgacagtagtcacacatagtgctgtttatatagtttaggagtaagagtgttgttttttattcagattgggaaatccattccattttgtgaattgtgacaaataacagcagtggaaaaagtatgtgcttagaattgtgaaagaattagcagtaaaatacatgagataaagacctcaagaagttaaaagatacttaattcttgccttatacctcactctattctgtaaatttgaaaaaaaagcatggatacctggatatccttggcttctttgagaatttaagagaaattaaatctgaataaataa

SEQ ID NO: 9 - protein, 78 aa, Homo sapiens
MSATTACWPAFTVLGEARGDQVDWSRLYRDTGLVKMSRKPRASSPFSNNHPSTPKRFPRQPRREKGPVKEVPGTKGSP

SEQ ID NO: 10 - DNA, 643 bp, Homo sapiens
ctggattcttcctggatggggatccagatggaggtggagggttgatttgggaagcagagcacagcagcccaaatttgcttgtaatgtcggcgactacagcctgctggcctgccttcactgtcctgggggaagctcggggagaccaggtggactggagtagactgtacagagacactggtctggtgaagatgtccaggaaaccacgagcctccagcccattttccaacaaccacccatcaacaccaaagaggttcccaagacaacccagaagggaaaagggacccgtcaaggaagttccaggaacaaaaggctctccctaaaagaccaccgcttcaaaaaaacctgaggaatggagtgggccaacactatccagccactctgaccagccgaacgaggaactcaatcaaaatgcgccatagcaggaccacaagggcaaggagaccaccgccttctccagtgcttccttgggcagccagtaattcccaggcaaggccagagacttcaagtctatctgaaaagtctccagaagtctaaccccagataaatagccaacagggtgtagagtacgttttacaccccaaagggtatgccccatggtgatggaaataaaatgaacatgttgtaaaaaaaaaaaaaaaaaaaa

SEQ ID NO: 11 - protein, 127 aa, Homo sapiens
MWMGLIQLVEGVKRKDQGFLEKEFYHKTNIKMRCEFLACWPAFTVLGEAWRDQVDWSRLLRDAGLVKMSRKPRASSPLSNNHPPTPKRRGSGRHPLNPGPEALSKFPRQPGREKGPIKEVPGTKGSP

SEQ ID NO: 12 - DNA, 213 bp, Homo sapiens
agttccaggaacaaaaggctctccctaaaagaccgccgcttcaaaaaaacctgaggaatggagtgggccaacactatccagccactctgaccagccgaacgaggaactcaatcaaaatgagccatagcgggaccacaagggcaaggagaccaccaccttctccagtctctcttcggacagccagtaattcccgggcaaggccagagacttcaa

SEQ ID NO: 13 - protein, 110 aa, Homo sapiens
MWMGLIQLVEGVKRKDQGFLEKEFYHKTNIKMRCEFLACWPAFTVLGEAWRDQVDWSRLLRDAGLVKMSRKPRASSPLSNNHPPTPKRFPRQPGREKGPIKEVPGTKGSP

SEQ ID NO: 14 - DNA, 847 bp, Homo sapiens
gtgcaatggctagtactatgtgtcaacttgtctaggctatactgctcagctgtgtggtcaaacagtagtctagatgttgctgtgaaggtattttgtagatgtgatcaacatttacaatcagttgattttaagtaaagcagtttaacttccataatgtggatgggcctcatccaattagttgaaggtgttaagagaaaagaccaaggtttcctggaaaaggaattctaccacaagactaacataaaaatgcgctgtgagtttctagcctgctggcctgccttcactgtcctgggggaggcttggagagaccaggtggactggagtagactgttgagagacgctggtctggtgaagatgtccaggaaaccacgagcctccagcccattgtccaacaaccacccaccaacaccaaagaggcgaggaagtggaaggcatcctctcaaccctggcccagaagccctatcaaagttcccaagacaacccggaagggaaaagggacccatcaaggaagttccaggaacaaaaggctctccctaaaagaccgccgcttcaaaaaaacctgaggaatggagtgggccaacactatccagccactctgaccagccgaacgaggaactcaatcaaaatgagccatagcgggaccacaagggcaaggagaccaccaccttctccagtctctcttcggacagccagtaattcccgggcaaggccagagacttcaagtctatctgaaaagtctccagaggtctaaccccagataaatagccaacagggtgtagagtacattttacaccccaaagagtgtgccccatggtgatgaaaataaagtgaacatgttgcaaaatga

SEQ ID NO: 15 - protein, 419 aa, Homo sapiens
MGTLSAPPCTQRIKWKGLLLTASLLNFWNLPTTAQVTIEAEPTKVSEGKDVLLLVHNLPQNLTGYIWYKGQMRDLYHYITSYVVDGEIIIYGPAYSGRETAYSNASLLIQNVTREDAGSYTLHIIKGDDGTRGVTGRFTFTLHLETPKPSISSSNLNPRETMEAVSLTCDPETPDASYLWWMNGQSLPMTHSLKLSETNRTLFLLGVTKYTAGPYECEIRNPVSASRSDPVTLNLLPKLPKPYITINNLNPRENKDVLNFTCEPKSENYTYIWWLNGQSLPVSPRVKRPIENRILILPSVTRNETGPYQCEIRDRYGGIRSDPVTLNVLYGPDLPRIYPSFTYYRSGEVLYLSCSADSNPPAQYSWTINEKFQLPGQKLFIRHITTKHSGLYVCSVRNSATGKESSKSMTVEVSDWTVP

SEQ ID NO: 16 - DNA, 279 bp, Homo sapiens
cgaagctgcccaagccctacatcaccatcaacaacttaaaccccagggagaataaggatgtcttaaacttcacctgtgaacctaagagtgagaactacacctacatttcgtggctaaatggtcagagcctcccggtcagtcccagggtaaagcgacccattgaaaacaggatcctcattctacccagtgtcacgagaaatgaaacaggaccctatcaatgtgaaatacgggaccgatatggtggcatccgcagtgacccagtcaccctgaatgtcctct

SEQ ID NO: 17 - protein, 335 aa, Homo sapiens
MGPLSAPPCTEHIKWKGLLLTASLLNFWNLPTTAQVTIEAQPPKVSEGKDVLLLVHNLPQNLTGYIWYKGQIRDLYHYITSYVVDGQIIIYGPAYSGRETAYSNASLLIQNVTREDAGSYTLHIIKRGDGTRGVTGYFTFTLYLETPKPSISSSNLNPREAMETVILTCDPETPDTSYQWWMNGQSLPMTHRFQLSETNRTLFLFGVTKYTAGPYECEIRNSGSASRSDPVTLNLLHGPDLPRIHPSYTNYRSGDNLYLSCFANSNPPAQYSWTINGKFQQSGQNLFIPQITTKHSGLYVCSVRNSATGEESSTSLTVKVSASTRIGLLPLLNPT

SEQ ID NO: 18 - DNA, 1612 bp, Homo sapiens
gacagagaggtgtcctgggcctgaccccacccatgagcctgggaattgctgctgccccaggaagaggctcagtgcagaaggaggaaggacagcacagctgacagccgtgctcaggaagtttctggatcctaggctcatctccacagaggagaacacacaggcagcagagaccatggggcccctctcagcccctccctgcacagagcacatcaaatggaaggggctcctggtcacagcatcacttttaaacttctggaacctgcccaccactgcccaagtcacgattgaagcccagccaccaaaagtttccgaggggaaggatgttcttctacttgtccacaatttgccccagaatcttactggctacatctggtacaaagggcaaatcagggacctctaccattacattacatcatatgtagtagacggtcaaataattatatatgggcctgcatatagtggacgagaaacagcatattccaatgcatccctgctgatccagaatgtcacccgggaggacgcaggatcctacaccttacacatcataaagcgaggtgatgggactagaggagtaactggatatttcaccttcaccttatacctggagactcccaagccctccatctccagcagcaacttaaaccccagggaggccatggaaactgtgatcttaacctgtgatcctgagactccggacacaagctaccagtggtggatgaatggtcagagcctccctatgactcataggtttcagctgtccgaaaccaacaggaccctctttctatttggtgtcacaaagtatactgcaggaccctatgaatgtgaaatacggaactcagggagtgccagccgcagtgacccagtcaccctgaatctcctccatggtccagacctccccagaattcacccttcatacaccaattaccgttcaggagataacctctacttgtcttgcttcgcgaactctaacccaccggcacagtattcttggacaattaatgggaagtttcagcaatcaggacaaaatctgtttatcccccaaattactacaaagcatagcgggctctatgtttgctctgttcgtaactcagccactggcgaggaaagctccacatcgttgacagtcaaagtctctgcttctacaagaataggacttcttcctctccttaatccaacatagcagctgtgatgtcatttctgtatttcaggaagactggcaggagatttatggaaaggtctcttacaaggactcttgaatacaagctcctgataacttcaagatcataccactggactaagaactttcaaaattttaatgaacaggctgataccttcatgaaattcaagacaaagaagaaaaatactcaatgttattggactaaataatcaaaaggataatgatttcataattttctatttgaaaatgtgctgattcttggaatgtttcattctccagatttatgaacattttttcttgagcaattggtaaagtatacttttgtaaacaaaaattgaaacatttccttttgctctctatctgagtgccccagaattgggaatctattcatgagtattcatatgtttatggtaataaagctatttgcacaagttc

SEQ ID NO: 19 - protein, 419 aa, Homo sapiens [sequence omitted]

SEQ ID NO: 20 - DNA, 2043 bp, Homo sapiens
ggacagcacagctgacagccgtactcaggaagcttctggatcctaggcttatctccacagaggagaacacacaagcagcagagaccatggggcccctctcagcccctccctgcacacacctcatcacttggaaggggctcctgctcacagcatcacttttaaacttctggaatccgcccacaactgcccaagtcacgattgaagcccagccacccaaagtttctgaggggaaggatgttcttctacttgtccacaatttgccccagaatcttgctggctacatttggtacaaagggcaaatgacatacgtctaccattacattacatcatatgtagtagacggtcaaagaattatatatgggcctgcatacagtggaagagaaagagtatattccaatgcatccctgctgatccagaatgtcacgcaggaggatgcaggatcctacaccttacacatcataaagcgacgcgatgggactggaggagtaactggacatttcaccttcaccttacacctggagactcccaagccctccatctccagcagcaacttaaatcccagggaggccatggaggctgtgatcttaacctgtgatcctgcgactccagccgcaagctaccagtggtggatgaatggtcagagcctccctatgactcacaggttgcagctgtccaaaaccaacaggaccctctttatatttggtgtcacaaagtatattgcaggaccctatgaatgtgaaatacggaacccagtgagtgccagccgcagtgacccagtcaccctgaatctcctcccaaagctgtccaagccctacatcacaatcaacaacttaaaccccagagagaataaggatgtcttaaccttcacctgtgaacctaagagtgagaactacacctacatttggtggctaaatggtcagagcctccctgtcagtcccagggtaaagcgacccattgaaaacaggatcctcattctacccaatgtcacgagaaatgaaacaggaccttatcaatgtgaaatacgggaccgatatggtggcatccgcagtgacccagtcaccctgaatgtcctctatggtccagacctccccagcatttacccttcattcacctattaccgttcaggagaaaacctctacttgtcctgcttcgccgagtctaacccacgggcacaatattcttggacaattaatgggaagtttcagctatcaggacaaaagctctctatcccccaaataactacaaagcatagtgggctctatgcttgctctgttcgtaactcagccactggcaaggaaagctccaaatccatcacagtcaaagtctctgactggatattaccctgaattctactagttcctccaattccattttctcccatggaatcacgaagagcaagacccactctgttccagaagccctataagctggaggtggacaactcgatgtaaatttcatgggaaaacccttgtacctgacatgtgagccactcagaactcaccaaaatgttcgacaccataacaacagctactcaaactgtaaaccaggataagaagttgatgacttcacactgtggacagtttttccaaagatgtcagaacaagactccccatcatgataaggctcccacccctcttaactgtccttgctcatgcctgcctctttcacttggcaggataatgcagtcattagaatttcacatgtagtagcttctgagggtaacaacagagtgtcagatatgtcatctcaacctcaaacttttacgtaacatctcaggggaaatgtggctctctccatcttgcatacagggctcccaatagaaatgaacacagagatattgcctgtgtgtttgcagagaagatggtttctataaagagtaggaaagctgaaattatagtagagtctcctttaaatgcacattgtgtggatggctctcaccatttcctaagagatacagtgtaaaacgtgacagtaatactgattctagcagaataaaacatgtaccacatttgctaaaaaaaaaaaaaaaaaaaaaaaaaaaaa

SEQ ID NO: 21 - protein, 335 aa, Homo sapiens
MGPLSAPPCTQHITWKGVLLTASLLNFWNLPITAQVTIEALPPKVSEGKDVLLLVHNLPQNLAGYIWYKGQLMDLYHYITSYVVDGQINIYGPAYTGRETVYSNASLLIQNVTREDAGSYTLHIIKRGDRTRGVTGYFTFNLYLKLPKPYITINNSKPRENKDVLAFTCEPKSENYTYIWWLNGQSLPVSPRVKQPIENRILILPSVTRNETGPYECEIRDRDGGMHSDPVTLNVLYGPDLPSIYPSFTYYRSGENLYLSCFAESNPPAEYFWTINGKFQQSGQKLSIPQITTKHRGLYTCSVRNSATGKESSKSMTVEVSAPSGIGRLPLLNPI

SEQ ID NO: 22 - DNA, 1636 bp, Homo sapiens
ggggaaggaggaaggacagcacagcctacagccgtgctcaggaagtttctggatcctaggctcagctccacagaggagaacacgcaggcgcagagaccatggggcccctctcagcccctccctgcacacagcacatcacctggaagggggtcctgctcacagcatcacttttaaacttctggaacctgcctatcactgctcaagtcacgattgaagccctgccacccaaagtttccgaggggaaggatgttcttctacttgtccacaatttgcctcagaatcttgctggctacatctggtacaaaggacaactgatggacctctaccattacattacatcatatgtagtagacggtcaaataaatatatatgggcctgcatacactggacgagaaacagtatattccaatgcatccctgctgatccagaatgtcacccgggaagacgcaggatcctataccttacacatcataaagcgaggtgataggactagaggagtaactggatatttcaccttcaacttatacctgaagctgcccaagccctacatcaccatcaacaactcaaaacccagggagaataaggatgtcttagccttcacctgtgaacctaagagtgagaactacacctacatttggtggctaaatggtcagagcctcccggtcagtcccagggtaaagcaacccattgaaaacaggatcctcattctacccagtgtcacgagaaatgaaacaggaccctatgaatgtgaaatacgggaccgagatggtggcatgcacagtgacccagtcaccctgaatgtcctctatggtccagacctccccagcatttacccttcattcacctattaccgttcaggagaaaacctctacttgtcctgcttcgcggaatctaacccaccggcagagtatttttggacaattaatgggaagtttcagcaatcaggacaaaagctctctatcccccaaattactacaaagcatagagggctctatacttgctctgttcgtaactcagccactggcaaggaaagctccaaatccatgacagtcgaagtctctgctccttcaggaataggacgtcttcctctccttaatccaatatagcagccgtgaagtcatttctgtatttcaggaagactggcagacagttgctttgattcttcctcaaactacttacaatcacctacagtccaaaattgctttttcttcaaggagatttatggaaaagactctgacaaggactcttgaatacaagttcctgataacttcaagatcataccactggactaagaactttcaaaattttaatgaacaggctgataccttcatgaaattctagacaaagaagaaaaaaactccatgttattggactaaataatcaaaagcataatgttttcataattttctatttgaaaatgtgctgattctttgaatgttttattctccagatttatgaactttttttcttgagcaattggtaaagtatacttttgtaaacaaaaattgaaacatttgcttttactctctatctgagtgccccagaattgggaaactattcatgagtattcatatgtttatggtaataaagttatctgcacaagttcaaaaaaaaaaaaaaaaaaaaaaaaaaaaaa

SEQ ID NO: 23 - protein, 435 aa, Homo sapiens
MGPLSAPPCTQHITWKGLLLTASLLNFWNLPTTAQVIIEAKPPKVSEGKDVLLLVHNLPQNLTGYIWYKGQMTDLYHYITSYVVHGQIIYGPAYSGRETVYSNASLLIQNVTQEDAGSYTLHIIKRGDGTGGVTGYFTVTLYSETPKPSISSSNLNPREVMEAVRLICDPETPDASYLWLLNGQNLPMTHRLQLSKTNRTLYLFGVTKYIAGPYECEIRNPVSASRSDPVTLNLLPKLPMPYITINNLNPREKKDVLAFTCEPKSRNYTYIWWLNGQSLPVSPRVKRPIENRILILPSVTRNETGPYQCEIRDRYGGIRSNPVTLNVLYGPDLPRIYPSFTYYRSGENLDLSCFADSNPPAEYSWTINGKFQLSGQKLFIPQITTNHSGLYACSVRNSATGKEISKSMIVKVSETASPQVTYAGPNTWFQEILLL

SEQ ID NO: 24 - DNA, 1409 bp, Homo sapiens
gggcgggcctaggctcatctccacaggggagaacacacagacagcagagaccatgggacccctctcagcccctccctgcactcagcacatcacctggaaggggctcctgctcacagcatcacttttaaacttctggaacctgcccaccactgcccaagtaataattgaagccaagccacccaaagtttccgaggggaaggatgttcttctacttgtccacaatttgccccagaatcttactggctacatctggtacaaagggcaaatgacggacctctaccattacattacatcatatgtagtacacggtcaaattatatatgggcctgcctacagtggacgagaaacagtatattccaatgcatccctgctgatccagaatgtcacacaggaggatgcaggatcctacaccttacacatcataaagcgaggcgatgggactggaggagtaactggatatttcactgtcaccttatactcggagactcccaagccctccatctccagcagcaacttaaaccccagggaggtcatggaggctgtgcgcttaatctgtgatcctgagactccggatgcaagctacctgtggttgctgaatggtcagaacctccctatgactcacaggttgcagctgtccaaaaccaacaggaccctctatctatttggtgtcacaaagtatattgcaggaccctatgaatgtgaaatacggaacccagtgagtgccagccgcagtgacccagtcaccctgaatctcctcccgaagctgcccatgccttacatcaccatcaacaacttaaaccccagggagaagaaggatgtgttagccttcacctgtgaacctaagagtcggaactacacctacatttggtggctaaatggtcagagcctcccggtcagtccgagggtaaagcgacccattgaaaacaggatactcattctacccagtgtcacgagaaatgaaacaggaccctatcaatgtgaaatacgggaccgatatggtggcatccgcagtaacccagtcaccctgaatgtcctctatggtccagacctccccagaatttacccttcattcacctattaccgttcaggagaaaacctcgacttgtcctgctttgcggactctaacccaccggcagagtattcttggacaattaatgggaagtttcagctatcaggacaaaagctctttatcccccaaattactacaaatcatagcgggctctatgcttgctctgttcgtaactcagccactggcaaggaaatctccaaatccatgatagtcaaagtctctgagacagcatctccccaggttacctatgctggtccaaacacctggtttcaagaaatccttctgctgtgacctcccaaagtgctaggattaaaacatgacccaccatgaaacccgccca

SEQ ID NO: 25 - protein, 492 aa, Homo sapiens
MIITQTSHCYMTSLGILFLINILPGTTGQGESRRQEPGDFVKQDIGGLSPKHAPDIPDDSTDNITIFTRILDRLLDGYDNRLRPGLGDAVTEVKTDIYVTSFGPVSDTDMEYTIDVFFRQTWHDERLKFDGPMKILPLNNLLASKIWTPDTFFHNGKKSVAHNMTTPNKLLRLVDNGTLLYTMRLTIHAECPMHLEDFPMDVHACPLKFGSYAYTTAEVVYSWTLGKNKSVEVAQDGSRLNQYDLLGHVVGTEIIRSSTGEYVVMTTHFHLKRKIGYFVIQTYLPCIMTVILSQVSFWLNRESVPARTVFGVTTVLTMTTLSISARNSLPKVAYATAMDWFIAVCYAFVFSALIEFATVNYFTKRSWAWEGKKVPEALEMKKKTPAAPAKKTSTTFNIVGTTYPINLAKDTEFSTISKGAAPSASSTPTIIASPKATYVQDSPTETKTYNSVSKVDKISRIIFPVLFAIFNLVYWATYVNRESAIKGMIRKQ

SEQ ID NO: 26 - DNA, 2785 bp, Homo sapiens
gagagagagagagagagagagagagagagagagcgagagagcgtgagcgcgcgcaagctagcgagcaaaccagagagacagaccgagagagggaccaggagagagacccagagagagaagaagaagccagaagccgagctctgtcagggctcaacctccaacttgtttcagttcattcatccttctctcctttccgctcagactgtagagctcggtctctccaagtttgtgcctaagaagatgataatcacacaaacaagtcactgttacatgaccagccttgggattcttttcctgattaatattctccctggaaccactggtcaaggggaatcaagacgacaagaacccggggactttgtgaagcaggacattggcgggctgtctcctaagcatgccccagatattcctgatgacagcactgacaacatcactatcttcaccagaatcttggatcgtcttctggacggctatgacaaccggctgcgacctgggcttggagatgcagtgactgaagtgaagactgacatctacgtgaccagttttggccctgtgtcagacactgacatggagtacactattgatgtattttttcggcagacatggcatgatgaaagactgaaatttgatggccccatgaagatccttccactgaacaatctcctggctagtaagatctggacaccggacaccttcttccacaatggcaagaaatcagtggctcataacatgaccacgcccaacaagctgctcagattggtggacaacggaaccctcctctatacaatgaggttaacaattcatgctgagtgtcccatgcatttggaagattttcccatggatgtgcatgcctgcccactgaagtttggaagctatgcctatacaacagctgaagtggtttattcttggactctcggaaagaacaaatccgtggaagtggcacaggatggttctcgcttgaaccagtatgaccttttgggccatgttgttgggacagagataatccggtctagtacaggagaatatgtcgtcatgacaacccacttccatctcaagcgaaaaattggctactttgtgatccagacctacttgccatgtatcatgactgtcattctgtcacaagtgtcgttctggctcaacagagagtctgttcctgcccgtacagtctttggtgtcaccactgtgcttaccatgaccaccttgagtatcagtgccagaaattccttacctaaagtggcatatgcgacggccatggactggttcatagccgtctgttatgcctttgtattttctgcactgattgaatttgccactgtcaactatttcaccaagcggagttgggcttgggaaggcaagaaggtgccagaggccctggagatgaagaagaaaacaccagcagccccagcaaagaaaaccagcactaccttcaacatcgtggggaccacctatcccatcaacctggccaaggacactgaattttccaccatctccaagggcgctgctcccagtgcctcctcaaccccaacaatcattgcttcacccaaggccacctacgtgcaggacagcccgactgagaccaagacctacaacagtgtcagcaaggttgacaaaatttcccgcatcatctttcctgtgctctttgccatattcaatctggtctattgggccacatatgtcaaccgggagtcagctatcaagggcatgatccgcaaacagtagatagtggtggcagtgcagcaaccagagcactgtataccccgtgaagcatccaggcacccaaaccccggggctccccttcgcgtatttcaggattctcctttttacccctctaccaagctgtgaccctcaattcatatttatgaatctctacgcaaaaaataactacagaaaaattacttgtccctccaatattgcccagtataaccccatcaaagccaaacactgccatttgtccagttgctcatcttagtctgccaatctcccctagctgagggcactgcatgtattttattgcactctgcccgctgcaaaaagaacaagagattctactctccatagtggaagccttggctgtttgagaggcccagaacaaggagaattgttgactcccatctagatcagatgactctaacttactaggcagccaggttaggctaggccatgtgatcctgcgtgccacctcccctgccttcagcaaggcctactaggcataagtactgatagcaaaggtgggagccagttctacacccccaacccatttattggtttggaaattagtggggacaattggtactaaccaccgtctaccatgtatggccaaaataaatagaactagctctgccagcctggcaccaagatggctggtgccctgccatgtccagcccctcgggaaaatagtcccctccttggtacatctctcctccagaaaatcttcttcccccactgcctttggcacccttgtagccaactgagcactacttaatttggactcattaccacctgtaaacttttcaggaaaaaatgatcaagcattttttatttatatcgaaaagttgcaaatagaaacaaagtgatctagatttaaaaaaaacatttttttaaaatatgggagagatacaaaagtcacctccctgccaaggcaactagcctatactggattgggtaagaggtttggagtggatggtagttgaggattgaagtctggctcaaaagagaaggctactggcagatgaaagtcaaattcttccttccatacactccacattccacaccctggcccaggcac

SEQ ID NO: 27 - protein, 474 aa, Homo sapiens
MWTVQNRESLGLLSFPVMITMVCCAHSTNEPSNMSYVKETVDRLLKGYDIRLRPDFGGPPVDVGMRIDVASIDMVSEVNMDYTLTMYFQQSWKDKRLSYSGIPLNLTLDNRVADQLCVPDTYFLNDKKSFVHGVTVKNRMIRLHPDGTVLYGLRITTTAACMMDLRRYPLDEQNCTLEIESYGYTTDDIEFYWNGGEGAVTGVNKIELPQFSIVDYKMVSKKVEFTTGAYPRLSLSFRLKRNIGYFILQTYMPSTLITILSWVSFWINYDASAARVALGITTVLTMTTISTHLRETLPKIPYVKAIDIYLMGCFVFVFLALLEYAFVNYIFFGKGPQKKGASKQDQSANEKNKLEMNKVQVDAHGNILLSTLEIRNETSGSEVLTSVSDPKATMYSYDSASIQYRKPLSSREAYGRALDRHGVPSKGRNRRRASQLKVKIPDLTDVNSIDKWSRMFFPITFSLFNVVYWLYYVH

SEQ ID NO: 28 - DNA, 2226 bp, Homo sapiens
agccttagccagatcactgagcgcccagtaaaaaaaacaaaatcaggttgagggcagaaatgaaatcaacatagcaacctccaatgcatgaaggaaactccgtttacacatgctcgtaggatcccctgcgtggaaacagcagcttgtctctgactacccggaggacatggagcaccccaaataggaactttagagggattgaaatctgttgcctgttccactaggaatattgtttgcaaggcacaaggtgtcttttggtagtgagcgcgctctgcgcatgcgcaggtccattcgggaattactgcccagcagccgactaagttgcattccttgaatcttcgcagaaaagacaattcttttaatcagagttagtaatgtggacagtacaaaatcgagagagtctggggcttctctctttccctgtgatgattaccatggtctgttgtgcacacagcaccaatgaacccagcaacatgtcatacgtgaaagagacagtggacagattgctcaaaggatatgacattcgcttgcggccggacttcggagggccccccgtcgacgttgggatgcggatcgatgtcgccagcatagacatggtctccgaagtgaatatggattatacactcaccatgtatttccagcagtcttggaaagacaaaaggctttcttattctggaatcccactgaacctcaccctagacaatagggtagctgaccaactctgggtaccagacacctactttctgaatgacaagaaatcatttgtgcatggggtcacagtgaaaaatcgaatgattcgactgcatcctgatggaacagttctctatggactccgaatcacaaccacagctgcatgtatgatggatcttcgaagatatccactggatgagcagaactgcaccctggagatcgaaagttatggctataccactgatgacattgaattttactggaatggaggagaaggggcagtcactggtgttaataaaatcgaacttcctcaattttcaattgttgactacaagatggtgtctaagaaggtggagttcacaacaggagcgtatccacgactgtcactaagttttcgtctaaagagaaacattggttacttcattttgcaaacctacatgccttctacactgattacaattctgtcctgggtgtctttttggatcaactatgatgcatctgcagccagagtcgcactaggaatcacgacagtgcttacaatgacaaccatcagcacccacctcagggagaccctgccaaagatcccttatgtcaaagcgattgatatttatctgatgggttgctttgtgtttgtgttcctggctctgctggagtatgcctttgtaaattacatcttctttgggaaaggccctcagaaaaagggagctagcaaacaagaccagagtgccaatgagaagaataaactggagatgaataaagtccaggtcgacgcccacggtaacattctcctcagcaccctggaaatccggaatgagacgagtggctcggaagtgctcacgagcgtgagcgaccccaaggccaccatgtactcctatgacagcgccagcatccagtaccgcaagcccctgagcagccgcgaggcctacgggcgcgccctggaccggcacggggtacccagcaaggggcgcatccgcaggcgtgcctcccagctcaaagtcaagatccccgacttgactgatgtgaattccatagacaagtggtcccgaatgtttttccccatcaccttttctctttttaatgtcgtctattggctttactatgtacactgaggtctgttctaatggttccatttagactactttcctcttctattgttttttaaccttacaggtccccaacagcgatactgctgtttctcgaggtaagagattcagccatccaattggttttaggtcttgcatatcagttttattactgcaccatgtttacttcaaaaagacaaaacaaaaaaaaaattatttttccagtctaccgtggtccaggttatcagctctttaagagctctattaattgccatgtttacaaacaaacacaaagagagaagttagacaggtagatctttagcagtcttttctagtttccctggatttcactgatttattttttagggaaaatgaaaagaggaccttgctgtccgcctgcactgcttcctggtaaactataacaaacttatgctgccaaaaaaaaaaaaaaaaa

SEQ ID NO: 29 - protein, 474 aa, Homo sapiens
MWRVRKRGYFGIWSFPLIIAAVCAQSVNDPSNMSLVKETVDRLLKGYDIRLRPDFGGPPVAVGMNIDIASIDMVSEVNMDYTLTMYFQQAWRDKRLSYNVIPLNLTLDNRVADQLWVPDTYFLNDKKSFVHGVTVKNRMIRLHPDGTVLYGLRITTTAACMMDLRRYPLDEQNCTLEIESYGYTTDDIEFYWRGDDNAVTGVTKIELPQFSIVDYKLITKKVVFSTGSYPRLSLSFKLKRNIGYFILQTYMPSILITILSWVSFWINYDASAARVALGITTVLTMTTINTHLRETLPKIPYVKAIDMYLMGCFVFVFMALLEYALVNYIFFGRGPQRQKKAAEKAASANNEKMRLDVNKMDPHENILLSTLEIKNEMATSEAVMGLGDPRSTMLAYDASSIQYRKAGLPRHSFGRNALERHVAQKKSRLRRRASQLKITIPDLTDVNAIDRWSRIFFPVVFSFFNIVYWLYYVN

SEQ ID NO: 30 - DNA, 7409 bp, Homo sapiens
gcgcggggaagggaagaagaggacgaggtggcgcggagaccgcgggagaacacagtgcctccggaggaaatctgctcggtccccggcagccgccgcttcccctttgatgttttggtacgccgtgcgcatgcgcctcacattagaattactgcactgggcagactaagttggatctcctctcttcagtgaaaccctcaattccatcaaaaactaaagggatgtggagagtgcggaaaaggggctactttgggatttggtccttccccttaataatcgccgctgtctgtgcgcagagtgtcaatgaccctagtaatatgtcgctggttaaagagacggtggatagactcctgaaaggctatgacattcgtctgagaccagattttggaggtccccccgtggctgtggggatgaacattgacattgccagcatcgatatggtttctgaagtcaatatggattataccttgacaatgtactttcaacaagcctggagagataagaggctgtcctataatgtaatacctttaaacttgactctggacaacagagtggcagaccagctctgggtgcctgatacctatttcctgaacgataagaagtcatttgtgcacggagtgactgttaagaaccgcatgattcgcctgcatcctgatggcaccgtcctttatggactcagaatcacaaccacagctgcctgcatgatggacctaaggaggtacccactggatgaacaaaactgcaccttggaaattgagagctatggatacacaactgatgacattgagttttactggcgtggcgatgataatgcagtaacaggagtaacgaaaattgaacttccacagttctctattgtagattacaaacttatcaccaagaaggttgttttttccacaggttcctatcccaggttatccctcagctttaagcttaagagaaacattggctactttatcctgcaaacatacatgccttccatcctgattaccatcctctcctgggtctccttctggattaattacgatgcttcagctgcaagggtggcattaggaatcacaactgtcctcacaatgaccacaatcaacacccacctccgggaaactctccctaaaatcccctatgtgaaggccattgacatgtacctgatggggtgctttgtcttcgttttcatggcccttctggaatatgccctagtcaactacatcttctttgggagggggccccaacgccaaaagaaagcagctgagaaggctgccagtgccaacaatgagaagatgcgcctggatgtcaacaagattttttataaagatattaaacaaaatgggacccaatatcgatccttgtgggaccctactggaaacctctccccaactagacggactaccaattacgatttctctctgtatacgatggacccccatgagaacatcttactgagcactctcgagataaaaaatgaaatggccacatctgaggctgtgatgggacttggagaccccagaagcacaatgctagcctatgatgcctccagcatccagtatcggaaagctgggttgcccaggcatagttttggccgaaatgctctggaacgacatgtggcgcaaaagaaaagtcgcctgaggagacgcgcctcccaactgaaaatcaccatccctgacttgactgatgtgaatgccatagatcggtggtcccgcatattcttcccagtggttttttccttcttcaacatcgtctattggctttattatgtgaactaaaacatggcctcccactggaagcaaggactagattcctcctcaaaccagttgtacagcctgatgtaggacttggaaaacacatcaatccaggacaaaagtgacgctaaaataccttagttgctggcctatcctgtggtccatttcataccatttgggttgcttctgctaagtaatgaatacactaaggtccttgtggttttccagttaaaacgcaagtgatttttacacatggtggctagacagcctgagtgctccatgttgtctgtttagtatgcagcctactcagaggggaataatttggaagatattcttagaaggctcaacagcattgtcagtcatttggtcataaccagatactcctcatcttcctttttaaggtcggcatgctgttgagatggcattgtccttatgaaacattatctgtaatgccatgcaaacacattacttgaagatgatctatgattttcttactgagatgataatggtgtcatgggaagattattcccactggtttctaaaagattctcttgtgatttgagcaggctaggggaatcaagacagagactcaggaaaccgatttggccagtccctttgcttgagcacggagaatcaactatgatgtctttcattttggcatttagagatgaggagacttctggacaatatcatgcatggtggccaagaaaatttttgctaaacggctatttcctaggtggttaaagtaagagttaacaacacagagcagagtagaaaatcagaaacgacggttgtaacaaaaagcaagcaagcaagaaagcatgacccttatcagctccacacagcatctggtctatacatactgtgtctagtggcagagggtgagtaagagagattgtttttccaacatcactagcttttgacagcatacctaaagaggtttttatagtttaatcgaagataaccatgaaatacaaaaattagagaaatgagaattgtcttagatattcaggttagattcagagtcattcaaatatacaaatacagagcacaaactagcaaacagattgtttttctcagacgaagtcagctgtccctgcaatttttgtccctataattttatttcttaatttaatagagtatttcaagagaaggatttgttcatcactttaaaggattcatggtcctctccagctttttttttgcttccaaaattctgattatattcttaggagactggcaaagtaaggctttggagagattgagtgaactatattttcttatatgcaatgaaattcaccattgtatttttcaaagcaaataatacttcaaggagtatgaacacacagagagttaatttgtgcattcattggtttggggcttgattttcttaagagtgctttcattgtatatgttgcaatctgcctaatcaaggaaaatatgaaaactagtggaaaataataacaaagccacattaacatgataaatgttatgagcctcagttgatattgcagaaaaatatataactgttaatcaggcaggcatgatgtattttttttctatttttaagttatgccattgtgcttctttctacactaattggacataagcattcatatgttggacaagaggagaataagctaatatgtcttccttctatcaatataaggctcatattttgcttttcttatagaaaatagtgaattgctaaattttccttaaagttgaatttgattgaactttttcttggaggatgactttgctatttctattttgaaaacaaagaaagctcttctttttagagtaatatccctaattgtgcatagcagccagtatccacctgtgaataatgtatgttttcttgattccttgtttccttcatgatttagcagcttggaatatgatggagtactattgcccttgcattccagctgtccaagaacaacaacaaacctttatccttcagctttctgaatttgccccaaaatggaatggtattttgtttttcaccagtgtaggaaaccttggccattatattttgattacataatcttgagcacctctgagtatcatctttgggcagaatctgaccaagattcttctcacaggctcagagtagagattcctcatgtttctccaggacacactttctcctaggcaatcattttggggcatcacactaagtaaagtgcctgccccttgtcaacagggggtaaagtttgactaaaaaacatcaggaaggaacatattgataactcaggggcacaactccaaaatgccattctgaaaaggctcttctagagtcaactcagagcccaagtgtagaagtgggctcttatgtgcaatcactgtacaagccataaaaatctttgatattgccatttatgattacaacaaaattttagatgtccaagaaagtcaacagaacaatccagatcaaagtgtagagaagcatctttgcagcttgagcctcaaaagcataaaaccaggaattcatttctgctctcagtgatacaagaaacaaggcaaaggaaaaaagatgggaccttagaagcaatgccctagagtaaaaagcatacattggcactcagtaaccacagagatagaaacaactgactcagcctctccagaaataacagtagatgtagaatttgttcttaaatatatgtttcgttgaaatgaaatgcagtcatcaaatgcgaggaggggtgctagacctgataagtctaggaagaccagtcagcttgatagccagttgttaaactaaaggaccacaaaggtgtgtttagtagttctgatatgggattactatcagtttatacatatgtatagattttcttttaattataaacagccagatagccagcaattaaggtgttttttcatctttgtgaaattcatggacaaattctgactctaaaatgcacagtctacatgaaatctttgatctcaatctgtatatatatatattgtacatgaccgctagtaggtatgaaatgcatttcagagttgaaaactcatgcaacataatcatgtgtttgcataaggaatgttaaaattctttctactacaatttattaacaggggaaaagattcaagcagtgccatctagaccttttctcttctcatttcttcaaaagcagtgctaagtaaaataataataataaaaatggtttatgaaccaaaagactttacattctagcattaggaacacacacaaaaaaatctgtcagcttacaaaagcacaacacataaagaaagagcagtggaatgcgtaatggggaaatgaatcatgtttaaagcaagacttgcattaaattggcaactaagataatttccattttctataggtaaccgtgttccagtttaatgattaccttcatactcaacaagaaaaatggcaaagcaacatcatcaaaataggtcttacaacatatctacatgtatatatgtgtatatatagattcatataaacatacatacatatatatgcattcatatgttggaaaacaaaaggaataagctaatatgttttatttccttcattaaaccagtatatgagtatttttaatttggcaaacaaaaatcaacatactgaaataagtaatacagggtactgagcatttctctatcagcaaatcaatgcctacagtttttatgaaccattgcacagttcaactcgacaatagtactgtaccccagaacatcagaagttaagtagttgtcacattgcttgtctaattgctctctttttcaaggaaacaaataacattgtccattggtgagtcaaaaacaaacatgtcttaagaaaatgaaaaatgataaaaattcctccaaagaggaagaaaaaaaaaaaactaaaccccaccatgttggttagggcaaaatactaagtattcacaactgtagcaatcatgccatttggctaaatgtacagagtacatgtaatgtgagcaaccataactttcactgaacgtgtgtaaatattaaaacagatttcttaaatatttttaacttctaatttgtattttatggtaaggcaatgtgctaattccgtttatggcttaagttgatgtgttataatatgtaaataattaaacatgctgtaaatgaatagtcaatagatacaaataattgtttagtttttttcttaatttttatttattttttactaagtactattactgcagtgcccccagcagagtaatttaaacacccttttgcataaatggtttgggaatcccagacagaagggtttcaatttgctatcacacacacagtcacacacagtcacacacacacacacacacacactcaaacacacataatcttttgctcacccactctgtctctctgcccgtctatgggaaacactctactatttatgtagtcaatataacaaacaagagatagcctttgaaatggcaattgggaaaagcaaaaatgatcattgataacttaatagacttttttatatgtcagagttcaagaaaccaaagtttgcaacttaaatctcagttttcaaacagtaaaagtttgtatagatggcactacagaaaaataaaaatggttattcctaccagctccagaaatgtgttacacaatatacactagaagactttttttttaataatagtattttgtccttaggtagtattgttcctttcaaccaaagactccagaattattgaaaaacaaaaaaggaaaaaaaaaatgagataatgggggaaaaaaaggacgctgcttcacaccaaaggtttaaaaaaatattttccaaatgcactaggaacattgtaaaaaccagaaaggagtgaacagaatgctaatgaagatactgccctaaagaaatctgtacaaaaaaaaaaaaaaaaagcagcactcttaaaaagctactaggtttttggaaattgaagtaaaatatttctgtagatatattcaaaattctgacatcaaattttaatttgcttaaagaagttttatttgtgatgaagatcaatatgattcaaatgatgaaaaacaaaactgtatgtcctttgagttcccaaaccaaatgtcactgccgtgtcacatcctctaatctgatgcccatgtgtgtgtccttgcgccatttgaagcaagttgacagttccatcagtttgtttttgtttttgtttttggttcaataatttgagttcaaccatcgtcattttaaacataattaatcccaacaaagttgcctatagtttaatttaaacctcacagcatttttaatttattttgcatgggtgtttaaatagttctgttacgaatattgtccctgcacagttctaaattgtccttttataaaaaaaaaaagtgatattctagtttcttcacaatgtagtgattatcagccttactaattaccttgtagcctttcttaatatgcacataatgcacattttccgatggctagaaaaatgcaaaacacagtggatatcattgcatctattttcatgtctttctaaaaacaggactattaaaatctctgggatacatgagatagtaaaaaatgaggattataaatgaatagcacataagaattattttcttgaatttaaacttattgcagccagtttcagcatgtaaatatataataatgttggctagtgtgtaattcttgaactaagaaatataaataaaaataaaaagattgtg

SEQ ID NO: 31 - protein, 467 aa, Homo sapiens
MSSPNIWSTGSSVYSTPVFSQKMTVWILLLLSLYPGFTSQKSDDDYEDYASNKTWVLTPKVPEGDVTVILNNLLEGYDNKLRPDIGVKPTLIHTDMYVNSIGPVNAINMEYTIDIFFAQTWYDRRLKFNSTIKVLRLNSNMVGKIWIPDTFFRNSKKADAHWITTPNRMLRIWNDGRVLYTLRLTIDAECQLQLHNFPMDEHSCPLEFSSYGYPREEIVYQWKRSSVEVGDTRSWRLYQFSFVGLRNTTEVVKTTSGDYVVMSVYFDLSRRMGYFTIQTYIPCTLIVVLSWVSFWINKDAVPARTSLGITTVLTMTTLSTIARKSLPKVSYVTAMDLFVSVCFIFVFSALVEYGTLHYFVSNRKPSKDKDKKKKNPAPTIDIRPRSATIQMNNATHLQERDEEYGYECLDGKDCASFFCCFEDCRTGAWRHGRIHIRIAKMDSYARIFFPTAFCLFNLVYWVSYLYL

SEQ ID NO: 32 - DNA, 3957 bp, Homo sapiens
gtaagtgtgaggggcatgagtatacacgagtgtgcgtgtctttccctctcccttatttgtctccgtatgagtctctccttgtaccctccccctgcctcgatgatattactcccccagacttggaagccgctgccagagtgacgctttgatggtatctgcaagcgtttttgctgatcttatctctgccccctgaatattaattccctaatctggtagcaatccatctccccagtgaaggacctactagaggcaggtggggggagccaccatcagatcataagcataagaataatacaaaggggagggattcttctgcaaccaagaggcaagaggcgagagaaggaaaaaaaaaaaagcgatgagttcgccaaatatatggagcacaggaagctcagtctactcgactcctgtattttcacagaaaatgacggtgtggattctgctcctgctgtcgctctaccctggcttcactagccagaaatctgatgatgactatgaagattatgcttctaacaaaacatgggtcttgactccaaaagttcctgagggtgatgtcactgtcatcttaaacaacctgctggaaggatatgacaataaacttcggcctgatataggagtgaagccaacgttaattcacacagacatgtatgtgaatagcattggtccagtgaacgctatcaatatggaatacactattgatatattttttgcgcaaacgtggtatgacagacgtttgaaatttaacagcaccattaaagtcctccgattgaacagcaacatggtggggaaaatctggattccagacactttcttcagaaattccaaaaaagctgatgcacactggatcaccacccccaacaggatgctgagaatttggaatgatggtcgagtgctctacaccctaaggttgacaattgatgctgagtgccaattacaattgcacaactttccaatggatgaacactcctgccccttggagttctccagttatggctatccacgtgaagaaattgtttatcaatggaagcgaagttctgttgaagtgggcgacacaagatcctggaggctttatcaattctcatttgttggtctaagaaataccaccgaagtagtgaagacaacttccggagattatgtggtcatgtctgtctactttgatctgagcagaagaatgggatactttaccatccagacctatatcccctgcacactcattgtcgtcctatcctgggtgtctttctggatcaataaggatgctgttccagccagaacatctttaggtatcaccactgtcctgacaatgaccaccctcagcaccattgcccggaaatcgctccccaaggtctcctatgtcacagcgatggatctctttgtatctgtttgtttcatctttgtcttctctgctctggtggagtatggcaccttgcattattttgtcagcaaccggaaaccaagcaaggacaaagataaaaagaagaaaaaccctcttcttcggatgttttccttcaaggcccctaccattgatatccgcccaagatcagcaaccattcaaatgaataatgctacacaccttcaagagagagatgaagagtacggctatgagtgtctggacggcaaggactgtgccagttttttctgctgttttgaagattgtcgaacaggagcttggagacatgggaggatacatatccgcattgccaaaatggactcctatgctcggatcttcttccccactgccttctgcctgtttaatctggtctattgggtctcctacctctacctgtgaggaggtatgggttttactgatatggttcttattcactgagtctcatggagagatgtctgttctaagtccacttaaataatcctctatgtggttgataatgatctgaatctgtttctatgtccaaacctggtaaattttataatgtcatattgtttgtgcccagccctcctttggttagtgtactttgaacttcgatgtttgctgtgtttcaaacctgcaaggcaaagtaaaattagagcaagaacattcaaaccaaataagatatttttcagctacagcaaataaaacagtgaaagccctgactatttacagtagtggtatccttactagattcataatgcaattagatagaaaaggtccaaaactgtaccctatgttcactccgggtcaagttgtgataaatttgatcccaatagaatacctccctcatttaagaaaaatcataactcactttaaatatgaaagcctagtccagaaatctattacacctttatctcaagataggaagaaaatttcctccacattcatgtacaatgatgtaaatatttcaataacttagaatgcttcaagtttagtgcatgcatctctttagatccaaaataaatggactgaagttatcatcctattgtcttttattttgtgtccttgggctataaaagattcctgaatgtaattataaggatttgggtttggaaatggagggaggaattttcattgccttctccctcatgcatgaagattcgaacagcttattttttccttgtatgacatattacaacactttaagtaaaatatagactggataatcaacatttgccacctctaaatatgcccaatttcataactagagtataaagtaattgtatgtgcttgccgctatttttttcttccttttaggatgatagatcataacagaacttattctccatctcaagatctgcttctagtgattgtgagtgccttgtgggcagaatccttgtcatttcctctttgggtctgtagcaccttgcatagtgcctggcatatagttggtgctcaataaatatggtttgaagtgaattgccctcacatgcttctggcaaatctctgtgctggcctgaaaccagtgactcatcttctcacataggtgttgtcaagtgatatttgattttgtaaaaataaccagtaggatccaaagaactttagctatttatgttcatcttcaaaaaattattttaggcaaagtccatactccttttaaaacaatatttatgtcctatgtttgtgtatagacatgactctactagggcataattagagtttgtgtattatttttccaggtttggggatgagtcagtccttgcccatccacaattttgtttgtgaacttataacaggaataagcaaaattcatacctgactagtgttcagaatgtagcattctgtgcgaaaaagtattgaagattagcttttaaaaactgaaaaaaaaaaatgaatgactcacatagaggttgagccaatgactgtggcctcattagattacattgtagttaaacaaagcaatttctccagacttaaaacatgatgagttgagctctatcttcatgtactcatcctgaatccttatttttctaaaatagcaccctttgttaattatttttatggaaattattactctgtcataattaaatcatagctagtataactttacagataacctaaaaagaatagaaaagaagagagagtggctttgtcagtataaaaccatgtaaagtcatcatcaagtcatctggatgaatcttgaaacacatttagctgccagttttacaaacctttaatatatcagtgctccagtatataacctcaaacaaatgtaaatagaacgaattattttcttgttttgaattgtcaatatattaaatgttgactctttgggagagttgttggcaagtttcaatggtgagaaacattattgtcaacttgaaatgtgttctgtaatggggacactacaaaaagctagctttccaatgtgtgcatagtattggcaatatgaatatatattatatataatctaatacttattataagctgctccctgtctatgtatttggaaaccttttcacaaagggaattgcctaacatgtggacttttacaataaaaatgctgcattctaatccatggtggcatctca

SEQ ID NO: 33 - protein, 632 aa, Homo sapiens
MGIRGMLRAAVILLLIRTWLAEGNYPSPIPKFHFEFSSAVPEVVLNLFNCKNCANEAVVQKILDRVLSRYDVRLRPNFGGAPVPVRISIYVTSIEQISEMNMDYTITMFFHQTWKDSRLAYYETTLNLTLDYRMHEKLWVPDCYFLNSKDAFVHDVTVENRVFQLHPDGTVRYGIRLTTTAACSLDLHKFPMDKQACNLVVESYGYTVEDIILFWDDNGNAIHMTEELHIPQFTFLGRTITSKEVYFYTGSYIRLILKFQVQREVNSYLVQVYWPTVLTTITSWISFWMNYDSSAARVTIGLTSMLILTTIDSHLRDKLPNISCIKAIDIYILVCLFFVFLSLLEYVYINYLFYSRGPRRQPRRHRRPRRVIARYRYQQVVVGNVQDGLINVEDGVSSLPITPAQAPLASPESLGSLTSTSEQAQLATSESLSPLTSLSGQAPLATGESLSDLPSTSEQARHSYGVRFNGFQADDSIFPTEIRNRVEAHGHGVTHDHEDSNESLSSDERHGHGPSGKPMLHHGEKGVQEAGWDLDDNNDKSDCLAIKEQFKCDTNSTWGLNDDELMAHGQEKDSSSESEDSCPPSPGCSFTEGFSFDLFNPDYVPKVDKWSRFLFPLAFGLFNIVYWVYHMY

SEQ ID NO: 34 - DNA, 2000 bp, Homo sapiens
gcgcccagaacgccccggccatgggcatccgaggcatgctgcgagccgcagtgatcctgctgctcatcaggacctggctcgcggagggcaactaccccagtcccatcccgaaattccacttcgagttctcctctgctgtgcccgaagtcgtcctgaacctcttcaactgcaaaaattgtgcaaatgaagctgtggttcaaaagattttggacagggtgctgtcaagatacgatgtccgcctgagaccgaattttggaggtgcccctgtgcctgtgagaatatctatttatgtcacgagcattgaacagatctcagaaatgaatatggactacacgatcacgatgttttttcatcagacttggaaagattcacgcttagcatactatgagaccaccctgaacttgaccctggactatcggatgcatgagaagttgtgggtccctgactgctactttctgaacagcaaggatgctttcgtgcatgatgtgactgtggagaatcgcgtgtttcagcttcacccagatggaacggtgcggtacggcatccgactcaccactacagcagcttgttccctggatctgcataaattccctatggacaagcaggcctgcaacctggtggtagagagctatggttacacggttgaagacatcatattattctgggatgacaatgggaacgccatccacatgactgaggagctgcatatccctcagttcactttcctgggaaggacgattactagcaaggaggtgtatttctacacaggttcctacatacgcctgatactgaagttccaggttcagagggaagttaacagctaccttgtgcaagtctactggcctactgtcctcaccactattacctcttggatatcgttttggatgaactatgattcctctgcagccagggtgacaattggcttaacttcaatgctcatcctgaccaccatcgactcacatctgcgggataagctccccaacatttcctgtatcaaggccattgatatctatatcctcgtgtgcttgttctttgtgttcctgtccttgctggagtatgtctacatcaactatcttttctacagtcgaggacctcggcgccagcctaggcgacacaggagaccccgaagagtcattgcccgctaccgctaccagcaagtggtggtaggaaacgtgcaggatggcctgattaacgtggaagacggagtcagctctctccccatcaccccagcgcaggcccccctggcaagcccggaaagcctcggttctttgacgtccacctccgagcaggcccagctggccacctcggaaagcctcagcccactcacttctctctcaggccaggcccccctggccactggagaaagcctgagcgatctcccctccacctcagagcaggcccggcacagctatggtgttcgctttaatggtttccaggctgatgacagtattattcctaccgaaatccgcaaccgtgtcgaagcccatggccatggtgttacccatgaccatgaagattccaatgagagcttgagctcggatgagcgccatggccatggccccagtgggaagcccatgcttcaccatggcgagaagggtgtgcaagaagcaggctgggaccttgatgacaacaatgacaagagcgactgccttgccattaaggagcaattcaagtgtgatactaacagtacctggggccttaatgatgatgagctcatggcccatggccaagagaaggacagtagctcagagtctgaggatagttgccccccaagccctgggtgctccttcactgaagggttctccttcgatctctttaatcctgactacgtcccaaaggtcgacaagtggtcccggttcctcttccctctggcctttgggttgttcaacattgtttactgggtataccatatgtattagtcccccagtgctccagaacagcgggagcactgtgctgtgctcctttcagtttcttttgggtttgtttttccctctttcctt

SEQ ID NO: 35 - protein, 479 aa, Homo sapiens
MLAVPNMRFGIFLLWWGWVLATESRMHWPGREVHEMSKKGRPQRQRREVHEDAHKQVSPILRRSPDITKSPLTKSEQLLRIDDHDFSMRPGFGGPAIPVGVDVQVESLDSISEVDMDFTMTLYLRHYWKDERLSFPSTNNLSMTFDGRLVKKIWVPDMFFVHSKRSFIHDTTTDNVMLRVQPDGKVLYSLRVTVTAMCNMDFSRFPLDTQTCSLEIESYAYTEDDLMLYWKKGNDSLKTDERISLSQFLIQEFHTTTKLAFYSSTGWYNRLYINFTLRRHIFFFLLQTYFPATLMVMLSWVSFWIDRRAVPARVPLGITTVLTMSTIITGVNASMPRVSYIKAVDIYLWVSFVFVFLSVLEYAAVNYLTTVQERKEQKLREKLPCTSGLPPPRTAMLDGNYSDGEVNDLDNYMPENGEKPDRMMVQLTLASERSSPQRKSQRSSYVSMRIDTHAIDKYSRIIFPAAYILFNLIYWSIFS

SEQ ID NO: 36 - DNA, 3174 bp, Homo sapiens
taataatggccgtaagcttaaaatagatccagggaggagctcattaacgtgaacatagaaagcagttccgcacctctggccttactcctcttggaaattgctttggtccatttttacttccttttattcgacgcaccagaaaataagacttttaccaacatttttactgcatttgacgatgaactaatttagaccggctaaaataattgttccactgggacacaggaattcaacctcagttcagaaaatccctgacatctgacgtaggaggatttataggtttagtggaaattgctttctcctgctctccagattgcatcctgtgggttgattttttttttgcatgagtaaacatccttctaataatgaacagaccaataatgtcttaagagagaaaaagaacaatcttttcctttttgctgtttctggagagagctgtttgaatttggaaacccatgttggctgtcccaaatatgagatttggcatctttcttttgtggtggggatgggttttggccactgaaagcagaatgcactggcccggaagagaagtccacgagatgtctaagaaaggcaggccccaaagacaaagacgagaagtacatgaagatgcccacaagcaagtcagcccaattctgagacgaagtcctgacatcaccaaatcgcctctgacaaagtcagaacagcttctgaggatagatgaccatgatttcagcatgaggcctggctttggaggccctgccattcctgttggtgtggatgtgcaggtggagagtttggatagcatctcagaggttgacatggactttacgatgaccctctacctgaggcactactggaaggacgagaggctgtcttttccaagcaccaacaacctcagcatgacgtttgacggccggctggtcaagaagatctgggtccctgacatgtttttcgtgcactccaaacgctccttcatccacgacaccaccacagacaacgtcatgttgcgggtccagcctgatgggaaagtgctctatagtctcagggttacagtaactgcaatgtgcaacatggacttcagccgatttcccttggacacacaaacgtgctctcttgaaattgaaagctatgcctatacagaagatgacctcatgctgtactggaaaaagggcaatgactccttaaagacagatgaacggatctcactctcccagttcctcattcaggaattccacaccaccaccaaactggctttctacagcagcacaggctggtacaaccgtctctacattaatttcacgttgcgtcgccacatcttcttcttcttgctccaaacttatttccccgctaccctgatggtcatgctgtcctgggtgtccttctggatcgaccgcagagccgtgcctgccagagtccccttaggtatcacaacggtgctgaccatgtccaccatcatcacgggcgtgaatgcctccatgccgcgcgtctcctacatcaaggccgtggacatctacctctgggtcagctttgtgttcgtgttcctctcggtgctggagtatgcggccgtcaactacctgaccactgtgcaggagaggaaggaacagaagctgcgggagaagcttccctgcaccagcggattacctccgccccgcactgcgatgctggacggcaactacagtgatggggaggtgaatgacctggacaactacatgccagagaatggagagaagcccgacaggatgatggtgcagctgaccctggcctcagagaggagctccccacagaggaaaagtcagagaagcagctatgtgagcatgagaatcgacacccacgccattgataaatactccaggatcatctttccagcagcatacattttattcaatttaatatactggtctattttctcctagatgcttgtaattctacaaatttcacatttccatggcatgcactacagaaataactgtataatgaaaaagtatttaaggatatggttaaaaaaaaatcccaggacccacccatgttttcactatcccttctgcagctttccaaagctacattgacgagacacttactggtttaatttgcacttattaaccatctattgaatacacagcattatattaggtgctgcaggaaatacgacactgtagcgactgatgttagttgttacccagatcccctggaaaagcacactaccagtgttgtgggcacatttagttccacccgttagacccttgatgctattcacatgaataatttattttcctcaagtgtcattacattgttcaggctacgtgaacttggaagcacctacaggccatttgcatgaaattcacatgcacctaaatcctcactttgacagaaactcatgcttcagtttataacctattacctattttgtatgcgactccacctccgcatgtttattttaataaaaggcaatgataacattcacattatttttctttatatgctgtggttcacaggctttaccccttcacaagaaaagctctttagattggcgcaattgcttctgattttggtgaaattttccctggtagggaaactttgaagataagagtacacacatgcattttgtctgttgtgtcatagaggtaactaggctagaaaatttgtgtttaaatgttccctattttatataatcaccacttcatgtttcttcttcttggagcatgtccttgttcaaagagaagtgctttctcagtgatgtgatatcttcactgaggaacttgggtagagaatgatttcttctgcataaacacttcaaggaaatacataatttgggactacttgtaactcattagaatgagaaatactcacatggtttcttaagagaaaaagaacatcggaaagcaaaataaatgggaagatatcactggacatctgcatttatactcgaaataccagcattttctatggaccagaaaactgccatcacctagaccacacagcccagataccaggcagacggatggcccaatggcaactgatgtcagggcatggggtaaaggagagggttctaatctggtgtatcacttaaaaacagttatttatattatatatctgctatatagatcaacctccaccaaacttacccaaacagcatttgttttatttgaaactcactttaataaagtgaattatatacacaaaaaaaaaaaaaaa

SEQ ID NO: 37 - protein, 211 aa, Homo sapiens
MANAGLQLLGFILAFLGWIGAIVSTALPQWRIYSYAGDNIVTAQAMYEGLWMSCVSQSTGQIQCKVFDSLLNLSSTLQATRALMVVGILLGVIAIFVATVGMKCMKCLEDDEVQKMRMAVIGGAIFLLAGLAILVATAWYGNRIVQEFYDPMTPVNARYEFGQALFTGWAAASLCLLGGALLCCSCPRKTTSYPTPRPYPKPAPSSGKDYV

SEQ ID NO: 38 - DNA, 3452 bp, Homo sapiens
gtctcagttcccgagcctgggagcaaccgcagcttctagtatccagactccagcgccgccccgggcgcggaccccaaccccgacccagagcttctccagcggcggcgcagcgagcagggctccccgccttaacttcctccgcggggcccagccaccttcgggagtccgggttgcccacctgcaaactctccgccttctgcacctgccacccctgagccagcgcgggcgcccgagcgagtcatggccaacgcggggctgcagctgttgggcttcattctcgccttcctgggatggatcggcgccatcgtcagcactgccctgccccagtggaggatttactcctatgccggcgacaacatcgtgaccgcccaggccatgtacgaggggctgtggatgtcctgcgtgtcgcagagcaccgggcagatccagtgcaaagtctttgactccttgctgaatctgagcagcacattgcaagcaacccgtgccttgatggtggttggcatcctcctgggagtgatagcaatctttgtggccaccgttggcatgaagtgtatgaagtgcttggaagacgatgaggtgcagaagatgaggatggctgtcattgggggtgcgatatttcttcttgcaggtctggctattttagttgccacagcatggtatggcaatagaatcgttcaagaattctatgaccctatgaccccagtcaatgccaggtacgaatttggtcaggctctcttcactggctgggctgctgcttctctctgccttctgggaggtgccctactttgctgttcctgtccccgaaaaacaacctcttacccaacaccaaggccctatccaaaacctgcaccttccagcgggaaagactacgtgtgacacagaggcaaaaggagaaaatcatgttgaaacaaaccgaaaatggacattgagatactatcattaacattaggaccttagaattttgggtattgtaatctgaagtatggtattacaaaacaaacaaacaaacaaaaaacccatgtgttaaaatactcagtgctaaacatggcttaatcttattttatcttctttcctcaatataggagggaagatttttccatttgtattactgcttcccattgagtaatcatactcaactgggggaaggggtgctccttaaatatatatagatatgtatatatacatgtttttctattaaaaatagacagtaaaatactattctcattatgttgatactagcatacttaaaatatctctaaaataggtaaatgtatttaattccatattgatgaagatgtttattggtatattttctttttcgtctatatatacatatgtaacagtcaaatatcatttactcttcttcattagctttgggtgcctttgccacaagacctagcctaatttaccaaggatgaattctttcaattcttcatgcgtgcccttttcatatacttattttattttttaccataatcttatagcacttgcatcgttattaagcccttatttgttttgtgtttcattggtctctatctcctgaatctaacacatttcatagcctacattttagtttctaaagccaagaagaatttattacaaatcagaactttggaggcaaatctttctgcatgaccaaagtgataaattcctgttgaccttcccacacaatccctgtactctgacccatagcactcttgtttgctttgaaaatatttgtccaattgagtagctgcatgctgttcccccaggtgttgtaacacaactttattgattgaatttttaagctacttattcatagttttatatccccctaaactacctttttgttccccattccttaattgtattgttttcccaagtgtaattatcatgcgttttatatcttcctaataaggtgtggtctgtttgtctgaacaaagtgctagactttctggagtgataatctggtgacaaatattctctctgtagctgtaagcaagtcacttaatctttctacctcttttttctatctgccaaattgagataatgatacttaaccagttagaagaggtagtgtgaatattaattagtttatattactctcattctttgaacatgaactatgcctatgtagtgtctttatttgctcagctggctgagacactgaagaagtcactgaacaaaacctacacacgtaccttcatgtgattcactgccttcctctctctaccagtctatttccactgaacaaaacctacacacataccttcatgtggttcagtgccttcctctctctaccagtctatttccactgaacaaaacctacgcacataccttcatgtggctcagtgccttcctctctctaccagtctatttccattctttcagctgtgtctgacatgtttgtgctctgttccattttaacaactgctcttacttttccagtctgtacagaatgctatttcacttgagcaagatgatgtaatggaaagggtgttggcattggtgtctggagacctggatttgagtcttggtgctatcaatcaccgtctgtgtttgagcaaggcatttggctgctgtaagcttattgcttcatctgtaagcggtggtttgtaattcctgatcttcccacctcacagtgatgttgtggggatccagtgagatagaatacatgtaagtgtggttttgtaatttaaaaagtgctatactaagggaaagaattgaggaattaactgcatacgttttggtgttgcttttcaaatgtttgaaaacaaaaaaaatgttaagaaatgggtttcttgccttaaccagtctctcaagtgatgagacagtgaagtaaaattgagtgcactaaacaaataagattctgaggaagtcttatcttctgcagtgagtatggcccgatgctttctgtggctaaacagatgtaatgggaagaaataaaagcctacgtgttggtaaatccaacagcaagggagatttttgaatcataataactcataaggtgctatctgttcagtgatgccctcagagctcttgctgttagctggcagctgacgctgctaggatagttagtttggaaatggtacttcataataaactacacaaggaaagtcagccactgtgtcttatgaggaattggacctaataaattttagtgtgccttccaaacctgagaatatatgcttttggaagttaaaatttaaatggcttttgccacatacatagatcttcatgatgtgtgagtgtaattccatgtggatatcagttaccaaacattacaaaaaaattttatggcccaaaatgaccaacgaaattgttacaatagaatttatccaattttgatctttttatattcttctaccacacctggaaacagaccaatagacattttggggttttataataggaatttgtataaagcattactctttttcaataaattgttttttaatttaaaaaaaggatta

SEQ ID NO: 39 - protein, 230 aa, Homo sapiens
MASLGLQLVGYILGLLGLLGTLVAMLLPSWKTSSYVGASIVTAVGFSKGLWMECATHSTGITQCDIYSTLLGLPADIQAAQAMMVTSSAISSLACIISVVGMRCTVFCQESRAKDRVAVAGGVFFILGGLLGFIPVAWNLHGILRDFYSPLVPDSMKFEIGEALYLGIISSLFSLIAGIILCFSCSSQRNRSNYYDAYQAQPLATRSSPRPGQPPKVKSEFNSYSLTGYV

SEQ ID NO: 40 - DNA, 2998 bp, Homo sapiens
aagtctctgacccacggctcagatttgcagatggattttgcaaagctgtggttaacgattagaaatcctttatcacctcagcccgtggccccttgtacttcgctcccctccctcaggatccctttctccctctccaggggcatctccccctccaaggctctgcaaagaactgccctgtcttctagatgccttcttgaggctgcttgtggccacccacagacacttgtaaggaggagagaagtcagcctggcagagagactctgaaatgagggattagaggtgttcaaggagcaagagcttcagcctgaagacaagggagcagtccctgaagacgcttctactgagaggtctgccatggcctctcttggcctccaacttgtgggctacatcctaggccttctggggcttttgggcacactggttgccatgctgctccccagctggaaaacaagttcttatgtcggtgccagcattgtgacagcagttggcttctccaagggcctctggatggaatgtgccacacacagcacaggcatcacccagtgtgacatctatagcacccttctgggcctgcccgctgacatccaggctgcccaggccatgatggtgacatccagtgcaatctcctccctggcctgcattatctctgtggtgggcatgagatgcacagtcttctgccaggaatcccgagccaaagacagagtggcggtagcaggtggagtctttttcatccttggaggcctcctgggattcattcctgttgcctggaatcttcatgggatcctacgggacttctactcaccactggtgcctgacagcatgaaatttgagattggagaggctctttacttgggcattatttcttccctgttctccctgatagctggaatcatcctctgcttttcctgctcatcccagagaaatcgctccaactactacgatgcctaccaagcccaacctcttgccacaaggagctctccaaggcctggtcaacctcccaaagtcaagagtgagttcaattcctacagcctgacagggtatgtgtgaagaaccaggggccagagctggggggtggctgggtctgtgaaaaacagtggacagcaccccgagggccacaggtgagggacactaccactggatcgtgtcagaaggtgctgctgaggatagactgactttggccattggattgagcaaaggcagaaatgggggctagtgtaacagcatgcaggttgaattgccaaggatgctcgccatgccagcctttctgttttcctcaccttgctgctcccctgccctaagtccccaaccctcaacttgaaaccccattcccttaagccaggactcagaggatccctttgccctctggtttacctgggactccatccccaaacccactaatcacatcccactgactgaccctctgtgatcaaagaccctctctctggctgaggttggctcttagctcattgctggggatgggaaggagaagcagtggcttttgtgggcattgctctaacctacttctcaagcttccctccaaagaaactgattggccctggaacctccatcccactcttgttatgactccacagtgtccagactaatttgtgcatgaactgaaataaaaccatcctacggtatccagggaacagaaagcaggatgcaggatgggaggacaggaaggcagcctgggacatttaaaaaaataaaaatgaaaaaaaaacccagaacccatttctcagggcactttccagaattctctcatatttgtgggctgggatcaagcctgcagcttgaggaaagcacaaggaaaggaaagaagatctggtggaaagctcaggtggcagcggactctgactccactgaggaactgcctcagaagctgcgatcacaactttggctgaagcccctgcctcactctagggcacctgacctggcctcttgcctaaaccacaaggctaagggctatagacaatggtttccttaggaacagtaaaccagtttttctagggatggcccttggctgggggatgacagtgtgggagctgtggggtactgaggaagacaccattccttgacggtgtctaagaagccaggtggatgtgtgtggtggctccagtgggtgtttctactctgccagtgagaggcagccccctagaaactcttcaggcgtaatggaaaatcagctcaaatgagatcaggcccccccagggtccacccacagagcactacagagcctctgaaagaccatagcaccaagcgagccccttcagattcccccactgtccatcggaagatgctccagagtggctagagggcatctaagggctccagcatggcatatccatgcccacggtgctgtgtccatgatctgagtgatagctgcactgctgcctgggattgcagctgaggtgggagtggagaatggttcccaggaagacagttccacctctaaggtccgaaaatgttccctttaccctggagtgggagtgaggggtcatacaccaaaggtattttccctcaccagtctaggcatgactggcttctgaaaaattccagcacacctcctcgaacctcattgtcagcagagagggcccatctgttgtctgtaacatgcctttcacatgtccaccttcttgccatgttccagctgctctcccaacctggaaggccgtctccccttagccaagtcctcctcaggcttggagaacttcctcagcgtcacctccttcattgagccttctctgatcactccatccctctcctacccctccctcccccaaccctcaatgtataaattgcttcttgatgcttagcattcacaatttttgattgatcgttatttgtgtgtgtgtgtccgatctcacaagtatattgtaaacccttcggtgggtgggggccatatcctagacctctctgtatcccccagactatctgtaacagtgccaggcacacagtaggtgatcaataaacacttgttgattgagaaaaaaaaaaa

SEQ ID NO: 41 - protein, 519 aa, Homo sapiens
MFPSNAWAFYFLSFLTNSRPYPHILPTPSSQTMAAYGQTQFTTGMQQATAYATYPQPGQPYGISSYGALWAGIKTEGGLSQSQSPGQTGFLSYGTSFSTPQPGQAPYSYQMQGSSFTTSSGIYTGNNSLTNSSGFNSSQQDYPSYPSFGQGQYAQYYNSSPYPAHYMTSSNTSPTTPSTNATYQLQEPPSGITSQAVTDPTAEYSTIHSPSTPIKDSDSDRLRRGSDGKSRGRGRRNNNPSPPPDSDLERVFIWDLDETIIVFHSLLTGSYANRYGRDPPTSVSLGLRMEEMIFNLADTHLFFNDLEECDQVHIDDVSSDDNGQDLSTYNFGTDGFPAAATSANLCLATGVRGGVDWMRKLAFRYRRVKEIYNTYKNNVGGLLGPAKREAWLQLRAEIEALTDSWLTLALKALSLIHSRTNCVNILVTTTQLIPALAKVLLYGLGIVFPIENIYSATKIGKESCFERIIQRFGRKVVYVVIGDGVEEEQGAKKHAMPFWRISSHSDLMALHHALELEYL

SEQ ID NO: 42 - DNA, 4323 bp, Homo sapiens
aaaccaataaggttaggacaagagaatagctgtggtttgcgttgcaaaaaccaaaaaaaaaaaaaaaaaaaaaaaaagaaagccccgaggctccatgggcagacctacaaggctgcgcaaacaaatcgagggatgagattctgctgtttctttgtctagggttctcagatgctatctgccgctgctgtttggtggggaaggagcgctgggcgcaaagctgttaccaaacagaacggtgggagctgatggctccgagtttggggcgaggtagaaactctccagtgccacttccgactttaagccttcctgttgccgtccactgtggcgggtttcttcctggggaacacgttttcgctcagtcgctcggcagcccgagcctgcggcagcggccaggcgcctgccccctgcgccgagctttcccctgcagaggcgctccactcccagaagcgccgcggctgcaccagagcgcctgagagcccccgcgcgtacccatccaggagcaaaactatgtcaggaatggaggtttgctaacccagaaaattcgaaggaacacattaaactggtggatgcagcagatgtaagcgctgtgcaaacatctcaagccagttcagatgttgctgtttcctcaagttgcaggtctatggaaatgcaggatctaaccagcccgcatagccgtctgagtggtagtagtgaatcccccagtggccccaaactcggtaactctcatataaatagtaattccatgactcccaatggcaccgaagttaaaacagagccaatgagcagcagtgaaacagcttcaacgacagccgacgggtctttaaacaatttctcaggttcagcaattgggagcagtagtttcagcccacgaccaactcaccagttctctccaccacagatttacccttccaaaccatacccacatattctccctaccccttcctcacaaactatggctgcatatgggcaaacacagtttaccacaggaatgcaacaagctacagcctatgccacgtacccacagccaggacagccgtacggcatttcctcatatggcatcaagactgaaggtggattgtcacagtctcagtcacctggacagacaggatttctcagctatggcacaagcttcagtacccctcaacctggacaggcaccatacagctaccagatgcaaggtagcagttttacaacatcatcaggaatatatacaggaaataattcactcacaaattcctctggatttaatagttcacagcaggactatccgtcttatcccagttttggccagggtcagtacgcacagtattataacagctcaccgtatccagcacattatatgaccagcagcaacaccagcccaacgacaccatccaccaatgccacttaccagcttcaagaaccgccatctggcatcaccagccaagcagttacagatcccacagcagagtacagcacaatccacagcccatcaacacccattaaagattcagattctgatcgattgcgtcgaggttcagatgggaaatcacgtggacggggccgaagaaacaataatccttcacctcccccagattctgatcttgagagagtgttcatctgggacttggatgagacaatcattgttttccactccttgcttactgggtcctacgccaacagatatgggagggatccacccacttcagtttcccttggactgcgaatggaagaaatgattttcaacttggcagacacacatttattttttaatgacttagaagaatgtgaccaagtccatatagatgatgtttcttcagatgataacggacaggacctaagcacatataactttggaacagatggctttcctgctgcagcaaccagtgctaacttatgtttggcaactggtgtacggggcggtgtggactggatgagaaagttggccttccgctacagacgggtaaaagagatctacaacacctacaaaaataatgttggaggtctgcttggtccagctaagagggaagcctggctgcagttgagggccgaaattgaagccctgaccgactcctggttgacactggccctgaaagcactctcgctcattcactcccggacaaactgtgtgaatattttagtaacaactactcagctcatcccagcattggcgaaagtcctgctgtatgggttaggaattgtatttccaatagaaaatatttacagtgcaactaaaataggaaaagaaagctgttttgagagaataattcaaaggtttggaagaaaagtggtgtatgttgttataggagatggtgtagaagaagaacaaggagcaaaaaagcacgcgatgcccttctggaggatctccagccactcggacctcatggccctgcaccatgccttggaactggagtacctgtaacagcgctcggcactttgacagcgcacagctgctctgtgaccagggacagatccagcaggccccagtctcgcatcagcgccggcctccagaacttagcaatttccgcctggtgatgcgcagttgctgtcagtcttgacctctgcctttgtggtgaatggaggaccacgtctatttcatcagaacagctgttgactctagtactgtgaatccagtgaaaataagccatgagaatgttttagcacagcgttatgtgtctgccacattaactacacggttcaaacctgtgaagaaaggacctgcaaacgcttcagttgttagcattttcaatgtgatataaacagcttctccaatacagcaaacctaattgcacaacagagactgaaatgtgtttcctgaataccagtggaggaattttcttgtaaagaaggtttactttttggtgtctcatacccagggtaatctgtacatctctacttatttatgaacagactttttttaaaaagataaaaaaacagctttattgaggtataattcacccaccagacttttttaaacatcaaataattgaagagacaatagcattagaaataagtgattaaaggcctctgcctcacaacatggcaagtacagtactttgaattttagcacattgcatagtagttttaagtatgtctaatttaaacgtataatatgtacatcactgagacaatcatgtacagaaagaatttttggtgtaaatttgtaataatggataattcttttacatattgtttagggaaatgatattgaaaggtagcaatgcctggatagtgaagcatgaggcagcacgtgcacaaattcatgtgccgtgccttatctgagttttcggtataaatatgtagataatggattttttttttttagataatgttgtcaagaccaaaagcatggatgtcaagtgtcagtaaggattttgttttctaaaattttttcctgcatcagttcttctgagggccttgatgaaataacacagcagtttcttaaacaatttgaaacaaaatgagctctcctaccacctcactttttcatttccacactaatgtattatatgtaactacttggaaaaaataattattcaaatgcttcttcccacaaagaatatagatgatagtagatatattttattaataaaatggttcatgaatcggagactaacaaagttttcatgtgctcagaattattaattatcgtgtctgcattttctttcgataaaggaagacacacgatgctaatccggaaatcagcaaactttgcattactccctatgtgcgtattttctctttcttcctgtcaccctgaggaaggttcattgccattgtcatcaccatggaaacaacgttcctctccacctgcattatgtactacatgacaggcatcaatctggggaaataataaaattatcacctttgtcagaccataagagtttctccaaaagtggtcagtttggctgggcaatattttctctcatctaacaaacacaatccattgtcatgaaattacccttaggatgagtcttctttaatcaatcatatattgggcggaaaaaacaccagctttgacccgaagtagttgaagagctacttcattcttttctgaagttgtgtgttgctgctagaaatagtcatttgtgaattatccaaattgtttaaattcacaattgaattagttttttcttcctttttgcttgaagcaaacagttgacaatttttaaccttttcattttatgtttttgtactctgcagactgaaaagacaaagtttatcttggccttactgtataaaggtgtgctgtgtccaccgttgtgtacagaatttttcttcattaattttgtgtttaagttaataaaatttatttgtgatgtactgtaaaaaaaaaaaaaaaaa

SEQ ID NO: 43 - protein, 264 aa, Homo sapiens
MPRSFLVRKPSDPNRKPNYSELQDSNPEFTFQQPYDQAHLLAAIPPPEILNPTASLPMLIWDSVLAPQAQPIAWASLRLQESPRVAELTSLSDEDSGKGSQPPSPPSPAPSSFSSTSVSSLEAEAYAAFPGLGQVPKQLAQLSEAKDLQARKAFNCKYCNKEYLSLGALKMHIRSHTLPCVCGTCGKAFSRPWLLQGHVRTHTGEKPFSCPHCSRAFADRSNLRAHLQTHSDVKKYQCQACARTFSRMSLLHKHQESGCSGCPR

SEQ ID NO: 44 - DNA, 1722 bp, Homo sapiens
attcattgcgccgcggcacggcctagcgagtggttcttctgcgctactgctgcgcgaatcggcgaccccagtgcctcgaccactatgccgcgctctttcctcgtcaggaagccctccgaccccaatcggaagcctaactacagcgagctgcaggactctaatccagagtttaccttccagcagccctacgaccaggcccacctgctggcagccatcccacctccggagatcctcaaccccaccgcctcgctgccaatgctcatctgggactctgtcctggcgccccaagcccagccaattgcctgggcctcccttcggctccaggagagtcccagggtggcagagctgacctccctgtcagatgaggacagtgggaaaggctcccagccccccagcccaccctcaccggctccttcgtccttctcctctacttcagtctcttccttggaggccgaggcctatgctgccttcccaggcttgggccaagtgcccaagcagctggcccagctctctgaggccaaggatctccaggctcgaaaggccttcaactgcaaatactgcaacaaggaatacctcagcctgggtgccctcaagatgcacatccgaagccacacgctgccctgcgtctgcggaacctgcgggaaggccttctctaggccctggctgctacaaggccatgtccggacccacactggcgagaagcccttctcctgtccccactgcagccgtgccttcgctgaccgctccaacctgcgggcccacctccagacccactcagatgtcaagaagtaccagtgccaggcgtgtgctcggaccttctcccgaatgtccctgctccacaagcaccaagagtccggctgctcaggatgtccccgctgaccctcgaggctccctcttcctctccatacctgcccctgcctgacagccttccccagctccagcaggaaggaccccacatccttctcactgccatggaattccctcctgagtgccccacttctggccacatcagccccacaggactttgatgaagaccattttctggttctgtgtcctctgcctgggctctggaagaggccttcccatggccatttctgtggagggagggcagctggcccccagccctgggggattcctgagctggcctgtctgcgtgggtttttgtatccagagctgtttggatacagctgctttgagctacaggacaaaggctgacagactcactgggaagctcccaccccactcaggggaccccactcccctcacacacacccccccacaaggaaccctcaggccaccctccacgaggtgtgactaactatgcaataatccacccccaggtgcagccccagggcctgcggaggcggtggcagactagagtctgagatgccccgagcccaggcagctatttcagcctcctgtttggtggggtggcacctgtttcccgggcaatttaacaatgtctgaaaagggactgtgagtaatggctgtcacttgtcgggggcccaagtggggtgctctggtctgaccgatgtgtctcccagaactattctgggggcccgacaggtgggcctgggaggaagatgtttacatttttaaaggtacactggtatttatatttcaaacattttgtatcaaggaaacgttttgtatagttatatgtacagtttattgatattcaataaagcagttaatttatatattaaaaaaaaaaaaaaaaaa

SEQ ID NO: 45 - protein, 414 aa, Homo sapiens
MHYCVLSAFLILHLVTVALSLSTCSTLDMDQFMRKRIEAIRGQILSKLKLTSPPEDYPEPEEVPPEVISIYNSTRDLLQEKASRRAAACERERSDEEYYAKEVYKIDMPPFFPSENAIPPTFYRPYFRIVRFDVSAMEKNASNLVKAEFRVFRLQNPKARVPEQRIELYQILKSKDLTSPTQRYIDSKVVKTRAEGEWLSFDVTDAVHEWLHHKDRNLGFKISLHCPCCTFVPSNNYIIPNKSEELEARFAGIDGTSTYTSGDQKTIKSTRKKNSGKTPHLLLMLLPSYRLESQQTNRRKKRALDAAYCFRNVQDNCCLRPLYIDFKRDLGWKWIHEPKGYNANFCAGACPYLWSSDTQHSRVLSLYNTINPEASASPCCVSQDLEPLTILYYIGKTPKIEQLSNMIVKSCKCS

SEQ ID NO: 46 - DNA, 6016 bp, Homo sapiens
agacacgtggttcagagagaacttataaatctcccctccccggcaagatcgtgatgttatctgctggcagcagaaggttcgctccgagcggagctccagaagctcctgacaagagaaagacagattgagatagagatagaaagagaaagagagaaagagacagcagagcgagagcgcaagtgaaagaggcaggggagggggatggagaatattagcctgacggtctagggagtcatccaggaacaaactgaggggctgcccggctgcagacaggaggagacagagaggatctattttagggtggcaagtgcctacctaccctaagcgagcaattccacgttggggagaagccagcagaggttgggaaagggtgggagtccaagggagcccctgcgcaaccccctcaggaataaaactccccagccagggtgtcgcaagggctgccgttgtgatccgcagggggtgaacgcaaccgcgacggctgatcgtctgtggctgggttggcgtttggagcaagagaaggaggagcaggagaaggagggagctggaggctggaagcgtttgcaagcggcggcggcagcaacgtggagtaaccaagcgggtcagcgcgcgcccgccagggtgtaggccacggcgcgcagctcccagagcaggatccgcgccgcctcagcagcctctgcggcccctgcggcacccgaccgagtaccgagcgccctgcgaagcgcaccctcctccccgcggtgcgctgggctcgcccccagcgcgcgcacacgcacacacacacacacacacacacacgcacgcacacacgtgtgcgcttctctgctccggagctgctgctgctcctgctctcagcgccgcagtggaaggcaggaccgaaccgctccttctttaaatatataaatttcagcccaggtcagcctcggcggcccccctcaccgcgctcccggcgcccctcccgtcagttcgccagctgccagccccgggaccttttcatctcttcccttttggccggaggagccgagttcagatccgccactccgcacccgagactgacacactgaactccacttcctcctcttaaatttatttctacttaatagccactcgtctctttttttccccatctcattgctccaagaatttttttcttcttactcgccaaagtcagggttccctctgcccgtcccgtattaatatttccacttttggaactactggccttttctttttaaaggaattcaagcaggatacgtttttctgttgggcattgactagattgtttgcaaaagtttcgcatcaaaaacaacaacaacaaaaaaccaaacaactctccttgatctatactttgagaattgttgatttcttttttttattctgacttttaaaaacaacttttttttccacttttttaaaaaatgcactactgtgtgctgagcgcttttctgatcctgcatctggtcacggtcgcgctcagcctgtctacctgcagcacactcgatatggaccagttcatgcgcaagaggatcgaggcgatccgcgggcagatcctgagcaagctgaagctcaccagtcccccagaagactatcctgagcccgaggaagtccccccggaggtgatttccatctacaacagcaccagggacttgctccaggagaaggcgagccggagggcggccgcctgcgagcgcgagaggagcgacgaagagtactacgccaaggaggtttacaaaatagacatgccgcccttcttcccctccgaaactgtctgcccagttgttacaacaccctctggctcagtgggcagcttgtgctccagacagtcccaggtgctctgtgggtaccttgatgccatcccgcccactttctacagaccctacttcagaattgttcgatttgacgtctcagcaatggagaagaatgcttccaatttggtgaaagcagagttcagagtctttcgtttgcagaacccaaaagccagagtgcctgaacaacggattgagctatatcagattctcaagtccaaagatttaacatctccaacccagcgctacatcgacagcaaagttgtgaaaacaagagcagaaggcgaatggctctccttcgatgtaactgatgctgttcatgaatggcttcaccataaagacaggaacctgggatttaaaataagcttacactgtccctgctgcacttttgtaccatctaataattacatcatcccaaataaaagtgaagaactagaagcaagatttgcaggtattgatggcacctccacatataccagtggtgatcagaaaactataaagtccactaggaaaaaaaacagtgggaagaccccacatctcctgctaatgttattgccctcctacagacttgagtcacaacagaccaaccggcggaagaagcgtgctttggatgcggcctattgctttagaaatgtgcaggataattgctgcctacgtccactttacattgatttcaagagggatctagggtggaaatggatacacgaacccaaagggtacaatgccaacttctgtgctggagcatgcccgtatttatggagttcagacactcagcacagcagggtcctgagcttatataataccataaatccagaagcatctgcttctccttgctgcgtgtcccaagatttagaacctctaaccattctctactacattggcaaaacacccaagattgaacagctttctaatatgattgtaaagtcttgcaaatgcagctaaaattcttggaaaagtggcaagaccaaaatgacaatgatgatgataatgatgatgacgacgacaacgatgatgcttgtaacaagaaaacataagagagccttggttcatcagtgttaaaaaatttttgaaaaggcggtactagttcagacactttggaagtttgtgttctgtttgttaaaactggcatctgacacaaaaaaagttgaaggccttattctacatttcacctactttgtaagtgagagagacaagaagcaaattttttttaaagaaaaaaataaacactggaagaatttattagtgttaattatgtgaacaacgacaacaacaacaacaacaacaaacaggaaaatcccattaagtggagttgctgtacgtaccgttcctatcccgcgcctcacttgatttttctgtattgctatgcaataggcacccttcccattcttactcttagagttaacagtgagttatttattgtgtgttactatataatgaacgtttcattgcccttggaaaataaaacaggtgtataaagtggagaccaaatactttgccagaaactcatggatggcttaaggaacttgaactcaaacgagccagaaaaaaagaggtcatattaatgggatgaaaacccaagtgagttattatatgaccgagaaagtctgcattaagataaagaccctgaaaacacatgttatgtatcagctgcctaaggaagcttcttgtaaggtccaaaaactaaaaagactgttaataaaagaaactttcagtcagaataagtctgtaagtttttttttttctttttaattgtaaatggttctttgtcagtttagtaaaccagtgaaatgttgaaatgttttgacatgtactggtcaaacttcagaccttaaaatattgctgtatagctatgctataggttttttcctttgttttggtatatgtaaccatacctatattattaaaatagatggatatagaagccagcataattgaaaacacatctgcagatctcttttgcaaactattaaatcaaaacattaactactttatgtgtaatgtgtaaatttttaccatattttttatattctgtaataatgtcaactatgatttagattgacttaaatttgggctctttttaatgatcactcacaaatgtatgtttcttttagctggccagtacttttgagtaaagcccctatagtttgacttgcactacaaatgcattttttttttaataacatttgccctacttgtgctttgtgtttctttcattattatgacataagctacctgggtccacttgtcttttcttttttttgtttcacagaaaagatgggttcgagttcagtggtcttcatcttccaagcatcattactaaccaagtcagacgttaacaaatttttatgttaggaaaaggaggaatgttatagatacatagaaaattgaagtaaaatgttttcattttagcaaggatttagggttctaactaaaactcagaatctttattgagttaagaaaagtttctctaccttggtttaatcaatatttttgtaaaatcctattgttattacaaagaggacacttcataggaaacatctttttctttagtcaggtttttaatattcagggggaaattgaaagatatatattttagtcgatttttcaaaaggggaaaaaagtccaggtcagcataagtcattttgtgtatttcactgaagttataaggtttttataaatgttctttgaaggggaaaaggcacaagccaatttttcctatgatcaaaaaattctttctttcctctgagtgagagttatctatatctgaggctaaagtttaccttgctttaataaataatttgccacatcattgcagaagaggtatcctcatgctggggttaatagaatatgtcagtttatcacttgtcgcttatttagctttaaaataaaaattaataggcaaagcaatggaatatttgcagtttcacctaaagagcagcataaggaggcgggaatccaaagtgaagttgtttgatatggtctacttcttttttggaatttcctgaccattaattaaagaattggatttgcaagtttgaaaactggaaaagcaagagatgggatgccataatagtaaacagcccttgtgttggatgtaacccaatcccagatttgagtgtgtgttgattatttttttgtcttccacttttctattatgtgtaaatcacttttatttctgcagacattttcctctcagataggatgacattttgttttgtattattttgtctttcctcatgaatgcactgataatattttaaatgctctattttaagatctcttgaatctgttttttttttttttaatttgggggttctgtaaggtctttatttcccataagtaaatattgccatgggaggggggtggaggtggcaaggaaggggtgaagtgctagtatgcaagtgggcagcaattatttttgtgttaatcagcagtacaatttgatcgttggcatggttaaaaaatggaatataagattagctgttttgtattttgatgaccaattacgctgtattttaacacgatgtatgtctgtttttgtggtgctctagtggtaaataaattatttcgatgatatgtggatgtctttttcctatcagtaccatcatcgagtctagaaaacacctgtgatgcaataagactatctcaagctggaaaagtcataccacctttccgattgccctctgtgctttctcccttaaggacagtcacttcagaagtcatgctttaaagcacaagagtcaggccatatccatcaaggatagaagaaatccctgtgccgtctttttattcccttatttattgctatttggtaattgtttgagatttagtttccatccagcttgactgccgaccagaaaaaatgcagagagatgtttgcaccatgctttggctttctggttctatgttctgccaacgccagggccaaaagaactggtctagacagtatcccctgtagccccataacttggatagttgctgagccagccagatataacaagagccacgtgctttctggggttggttgtttgggatcagctacttgcctgtcagtttcactggtaccactgcaccacaaacaaaaaaacccaccctatttcctccaatttttttggctgctacctacaagaccagactcctcaaacgagttgccaatctcttaataaataggattaataaaaaaagtaattgtgactcaaaaaaaaaaaaaa

SEQ ID NO: 47 - protein, 355 aa, Homo sapiens
MEPHLLGLLLGLLLGGTRVLAGYPIWWSLALGQQYTSLGSQPLLCGSIPGLVPKQLRFCRNYIEIMPSVAEGVKLGIQECQHQFRGRRWNCTTIDDSLAIFGPVLDKATRESAFVHAIASAGVAFAVTRSCAEGTSTICGCDSHHKGPPGEGWKWGGCSEDADFGVLVSREFADARENRPDARSAMNKHNNEAGRTTILDHMHLKCKCHGLSGSCEVKTCWWAQPDFRAIGDFLKDKYDSASEMVVEKHRESRGWVETLRAKYSLFKPPTERDLVYYENSPNFCEPNPETGSFGTRDRTCNVTSHGIDGCDLLCCGRGHNTRTEKRKEKCHCIFHWCCYVSCQECIRIYDVHTCK

SEQ ID NO: 48 - DNA, 3385 bp, Homo sapiens
tgctccgcgctgggctcgggaggggggcggctgcgggtggaggtgcgcttctgacaagcccgaaagtcatttccaatctcaagtggactttgttccaactattgggggcgtcgctccccctcttcatggtcgcgggcaaacttcctcctcggcgcctcttctaatggagccccacctgctcgggctgctcctcggcctcctgctcggtggcaccagggtcctcgctggctacccaatttggtggtccctggccctgggccagcagtacacatctctgggctcacagcccctgctctgcggctccatcccaggcctggtccccaagcaactgcgcttctgccgcaattacatcgagatcatgcccagcgtggccgagggcgtgaagctgggcatccaggagtgccagcaccagttccggggccgccgctggaactgcaccaccatagatgacagcctggccatctttgggcccgtcctcgacaaagccacccgcgagtcggccttcgttcacgccatcgcctcggccggcgtggccttcgccgtcacccgctcctgcgccgagggcacctccaccatttgcggctgtgactcgcatcataaggggccgcctggcgaaggctggaagtggggcggctgcagcgaggacgctgacttcggcgtgttagtgtccagggagttcgcggatgcgcgcgagaacaggccggacgcgcgctcggccatgaacaagcacaacaacgaggcgggccgcacgactatcctggaccacatgcacctcaaatgcaagtgccacgggctgtcgggcagctgtgaggtgaagacctgctggtgggcgcagcctgacttccgtgccatcggtgacttcctcaaggacaagtatgacagcgcctcggagatggtagtagagaagcaccgtgagtcccgaggctgggtggagaccctccgggccaagtactcgctcttcaagccacccacggagagggacctggtctactacgagaactcccccaacttttgtgagcccaacccagagacgggttcctttggcacaagggaccggacttgcaatgtcacctcccacggcatcgatggctgcgatctgctctgctgtggccggggccacaacacgaggacggagaagcggaaggaaaaatgccactgcatcttccactggtgctgctacgtcagctgccaggagtgtattcgcatctacgacgtgcacacctgcaagtagggcaccagggcgctgggaaggggtgaagtgtgtggctgggcggattcagcgaagtctcatgggaagcaggacctagagccgggcacagccctcagcgtcagacagcaaggaactgtcaccagccgcacgcgtggtaaatgacccagacccaactcgcctgtggacggggaggctctccctctctctcatcttacatttctcaccctactctggatggtgtgtggtttttaaagaagggggctttctttttagttctctagggtctgataggaacagacctgaggcttatctttgcacatgttaaagaaaataaaaatgaaaaaaaatttgactccaacagaacaggctgggctaatgtgagctctcagcctggcagtcaagacatcagcatgggcaaggttctgtttccaaactgctgcttctggtgacattccaagacgcctggagggtgggagtcaggaagtaggacacacccctgcagtctccttttcttggtccactcccattcaaatttgagctaatttctcattctgataaaagccataggtttagctaggatgaagtggtaggaaggtccgtggcagttgttagagtaggatttggagtttggaagaactggcagctcagggtggcctggtcagccgtttgaagagcagccatgtgttcttctcagtctcattttctctataaccctgttctgcacgaggggcagtcagatctcaaaatctttttctaccattctgcagtttccaccgtcaatgcagttttttttttgtttttttgtttttttttttttttggtggtagtggaccttgtaaataggctatgtaagggggcaagtcttctctagctcaaatggcttcctaaataaataagcggtatcttcagaaggggccattcagtccttcccagccctgctcacctgcagattctctgtacaaataactccaggtagagcagttggactccaggtcaccttagtataagttagacaaagggtccgtgagggagtagccatcaattcctgaaattccaactttgtgactagcagatggggaggatgaaaaccatccctttgcttcctctccaatacggacccatcttactgtgtcctttcctctctggggccaatgtgagtaaacacagacacagagttctttcccccagctcttcctccctcacctgcatgctgagatagcttccatccatgcagttcccaaggatctggattagaagttcaaaggggaaccagcagtcacctactcccttaggtgaagcatctcacggctgagttctccctgaggcatactggtccagctgagcgtcctagagaaagctagcaaaagggaggcacatggatttcacagtatgaattggttcaacaactgtcttagggagaatcagaaagaagagatgcagcaggggaatgagcagaacaaagatttttctttctcccccttctctctggggtctacctaaccctgacctaaaataccagggcagcgatctcccagctggtgcaggtgggcttgccaagatggtcgtccaggagcccgccttcacttctaaatctgctggccacaagccctgctaaagatacacatctcaccccctccgccaagtctgaaatgcccctccccatctcaccttagactgaaaagttttaaatcatgtcaactggataatacttgctttatgtgagaatacttcagcagaatggatacgaattttcaaaacaatcttttcatatctatgtattctatattaaaagtgataaagtcatgtttctggggcgtattcaagtagctgacaagtaattatttaataatagtacatgagtgcattgtaatgattctcgccgtagtcaggtaatagtatccaaccgaaatttcctaccaacctgctgtatccaaagttttgtaaaaagttgtagaagttgttgatctttttgattttatattcaaaaagtctctttttataaatattatttattatacaatgtatatacctttgagttaactaagattatatattatataaatatatatatatttggagaaaatatatttcatcatgcagtttttttctgttaagtcattaaagagaaggtaaacaaacctaaaaaaaaaaaaaaaaaaaaaaaaaaaaaaaaaa

SEQ ID NO: 49 - protein, 335 aa, Homo sapiens [sequence omitted]

SEQ ID NO: 50 - DNA, 2341 bp, Homo sapiens
gagaaaggagaggagggaggaggcgcgccgcgccatggtgtcctgcgcggggccagggccagggccggggccgggccaggccgggccatgagccgcgccgggagctgggacatggacgggctgcgggcagacggcgggggcgccggtggcgccccggcctcttcctcctcctcatcggtggcggcggcggcggcgtcaggccagtgccgcggctttctctccgcgcctgtgttcgccgggacgcattcggggcgggcggcggcggcggcagcggcggctgcggcggcggcggcggcagcctccggctttgcgtaccccgggacctctgagcgcacgggctcttcctcgtcgtcgtcctcttctgccgttgtagcggcgcgcccggaggctcccccagccaaagagtgcccagcacccacgcctgcagcggccgctgcagcgcccccgagcgctccagcgctgggctacggctaccacttcggcaacggctactacagctgccgtatgtcgcacggcgtgggcttacagcagaatgcgctcaagtcatcgccgcacgcctcgctgggaggctttcccgtggagaagtacatggacgtgtcaggcctggcgagcagcagcgtaccggccaacgaggtgccagcgcgagccaaggaggtatccttctaccagggctatacgagcccttaccagcacgtgcccggctatatcgacatggtgtccactttcggctccggggagcctcggcacgaggcctacatctccatggaggggtaccagtcctggacgctggctaacgggtggaacagccaggtgtactgcaccaaggaccagccacaggggtcccacttttggaaatcttcctttccaggggatgtggctctaaatcagccggacatgtgcgtctaccgaagagggaggaagaagagagtgccttacaccaaactgcagcttaaagaactggagaacgagtatgccattaacaaattcattaacaaggacaagcggcggcgtatctcggctgctacgaacctatctgagagacaagtgaccatttggtttcagaaccgaagagtgaaggacaagaaaattgtctccaagctcaaagatactgtctcctgatgtggtccaggttggccacagacagcttagaagccattcggttgtctccaaaaggcctttggaaagacttgaatatgtatttaattccccccaccccctgccaatggtggcaaattttgtgaattgtttttctctcttccccttatctggctctaaaaccttctgctgcccaacctgactttgtagttctgatttttacttgtttattattggttttgttcttgcctagggtttttaaaatatctgtttttaatgttttgtttctccctccaggccagtataaagggacttgaagtattttttaataatccgccccccaatgaacttcagaagtgccattctgatttaagggtttttttaaaaaattactttatttgttcattcccagcactgattatcttcataatccattaggacagaatggttttcagtcgttcatatcctgtaattaggtaattgaatcattagctctcagcagttgccctgaggcaagtggaaaggcaggcagtgctctggggtcaccgagaaagtctaaaaacaggaggctgaaggtactgtgatggctttaaaaatggccaccttattaaatagggattgtatcaatattgaaatgaagacaatctttccaactttgggtgtttcacttgctgttttaattgtttgtttttaacactttgtaggtttgtgttttcataatctttaatttgaaactcatgtgtcctcatggatcgtggatgccttcatttcttgagctctcaatgcagacatttaaatggctgcaatcagtagagtgacccgcggatggcataaatgcacctccttttcttggccttggatctatgggtctgggattgtggtcatctcctcaatcctcaaaaagaggctgaatcaatgtggccgtgggtgggaacttacatacagaacccaatgaagaacttgactgtctaaacaagggggcctcgcatggagctgtaaagcatctaacaaatatgaaaaatgtgaagttccaaggtccaagaagaaaaataatgatgtttctgaaagtgatgataaataattacttttaaagtgctgcatatttatacaattgagagattatttttgtaaatgcaatgtctgtgagctgggatacatgggcagtgcttcagacatttaaaaatcactttttactcctagggagatgccaataaacagaactcttttgtttcaaaaaaaaaaaaaa

SEQ ID NO: 51 - protein, 159 aa, Homo sapiens [sequence omitted]

SEQ ID NO: 52 - DNA, 1463 bp, Homo sapiens
atgaacgactttgacgagtgcggccagagcgcagccagcatgtacctgccgggctgcgcctactatgtggccccgtctgacttcgctagcaagccttcgttcctttcccaaccgtcgtcctgccagatgactttcccctactcttccaacctggctccgcacgtccagcccgtgcgcgaagtggccttccgcgactacggcctggagcgcgccaagtggccgtaccgcggcggcggcggcggcggcagcgcggggggcggcagcagcgggggcggccccggcgggggcggcggcggcgcggggggctacgctccctactacgcggcggcggcggcggcggctgcggcggccgcggcggccgaggaggcggccatgcaacgcgagcttctcccgcccgcgggccgccggccggacgtgctcttcaaggcgcctgagccggtgtgcgctgcgccggggccgccgcacggccccgcgggcgccgcctccaacttctacagcgcggtgggccgcaatggcatcttgccacagggcttcgaccagttctacgaggcagcgcccgggcccccgttcgccgggccgcagcccccgccgccacccgcgccgccacagcccgagggcgcagccgacaagggcgaccccaggaccggggctggtggcggcgggggcagtccctgcaccaaggcgacccctggctcggagcccaagggggcagcagaaggcagcggtggcgacggcgagggccccccgggagaggcgggggccgagaagagcagcagcgcagttgccccccagcggtcccggaaaaagcgctgtccctataccaagtaccagatccgcgaactggaacgcgagtttttctttaacgtgtacataaacaaagagaaaagacttcaactctctcggatgctcaacctcactgaccggcaagtcaaaatctggttccagaatcgcaggatgaaagaaaagaaactgaacagagaccgtctgcagtatttcactggaaaccccttattttgagagctccaggaagcgccctcaccccagccccactcacccaccctccttcccaccagcctgctctccgcaggcccactgtccttgggtttaatgacgtctcttctctgtggaacttcacgattccttcccacggtcaactcgggacctcccagcgaccactgcagcctgcggacgaggccgggacttggccgagcggatcctaataaggggaaaatggtaaatgcaaacgtcccgttacaattttaccgccagtgtgctgtcgttccccctccccctctccgagtcctcgtggggacacggcggggtctgtaggaagttgggccgggttgggggttgctagaaggcgctggtgttttgctctgagttttaagagatcccttccttcctcttcggtgaatgcaggttatttaaactttgggaaatgtacttttagtctgtcatatcaa

SEQ ID NO: 53 - protein, 376 aa, Homo sapiens
MNYEFEREIGFINSQPSLAECLTSFPPVADTFQSSSIKTSTLSHSTLIPPPFEQTIPSLNPGSHPRHGAGGRPKPSPAGSRGSPVPAGALQPPEYPWMKEKKAAKKTALLPAAAAAATAAATGPACLSHKESLEIADGSGGGSRRLRTAYTNTQLLELEKEFHFNKYLCRPRRVEIAALLDLTERQVKVWFQNRRMKHKRQTQCKENQNSEGKCKSLEDSEKVEEDEEEKTLFEQALSVSGALLEREGYTFQQNALSQQQAPNGHNGDSQSFPVSPLTSNEKNLKHFQHQSPTVPNCLSTMGQNCGAGLNNDSPEALEVPSLQDFSVFSTDSCLQLSDAVSPSLPGSLDSPVDISADSLDFFTDTLTTIDLQHLNY

SEQ ID NO: 54 - DNA, 1791 bp, Homo sapiens
tcttttgattaaagcccaaattgtcattgggcagaagcaatcatgtgacagccaattcggtccaatttcaaccttgtctccatgaattcaatagtttaatagtagcgcggtccccatacggctgtaatcagtgaattagaaaaaaaacaccctagcagcgatattctatgatagattttttttcctctgcgctcgcctttttcctaggccttgcccccccaaagcccctccaaaagagggaactttttctctgagggggctccaaggagaaggccatgaattacgaatttgagcgagagattggttttatcaatagccagccgtcgctcgctgagtgcctgacatcttttccccctgtcgctgatacatttcaaagttcatcaatcaagacctcgacgctttcacactcgacactgattcctcctccttttgagcagaccattcccagcctgaaccccggcagtcaccctcgccacggcgctggcggccgccccaagccgagccccgcgggcagccgcggcagcccggtgcccgccggcgccctgcagccgcccgagtacccctggatgaaggagaagaaggcggccaagaaaaccgcacttctgccggccgccgccgccgccgccaccgccgcagccaccggccctgcttgcctcagccacaaagaatccctggaaatcgccgatggcagcggcgggggatcgcggcgcctgagaactgcttacaccaacacacagcttctagagctggaaaaagaatttcatttcaacaagtacctttgcagaccccgaagggtggagattgcagcgctgctggatttgactgagagacaagtgaaagtgtggtttcagaaccggaggatgaagcacaagaggcagacccagtgcaaggaaaaccaaaacagcgaagggaaatgtaaaagccttgaggactccgagaaagtagaggaggacgaggaagagaagacgctctttgagcaagcccttagcgtctctggggcccttctggagagggaaggctacacttttcagcaaaatgccctctctcagcagcaggctcccaatggacacaatggcgactcccaaagtttcccagtctcgcctttaaccagcaatgagaaaaatctgaaacattttcagcaccagtcacccactgttcccaactgcttgtcaacaatgggccagaactgtggagctggcctaaacaatgacagtcctgaggcccttgaggtcccctctttgcaggactttagcgttttctccacagattcctgcctgcagctttcagatgcagtttcacccagtttgccaggttccctcgacagtcccgtagatatttcagctgacagcttagacttttttacagacacactcaccacaatcgacttgcagcatctgaattactaaaaacattaaagcaaaacaaagcatcaccaaacaaaaactcctttgaccaggtggttttgccttcttttatttgggagtttattttttattttcttcttgacctaccccttccctcctttaagtgttgaggattttctgtttagtgattccctgacccagtttcaaacagagccatcttttacagattattttggagttttagttgttttaaacctaactcaacaaccctttatgtgattcctgagagcagtatgaggcctgcaagaaagtgatcatataattgtatcttcactttctttttatttttgtattacattgggatgcattgtcatgcatattttttgtagaataaattctcctttgctataagtaaaaaaaaaaaaaa

SEQ ID NO: 55 - protein, 270 aa, Homo sapiens
MSSYFVNSFCGRYPNGPDYQLHNYGDHSSVSEQFRDSASMHSGRYGYGYNGMDLSVGRSGSGHFGSGERARSYAASASAAPAEPRYSQPATSTHSPQPDPLPCSAVAPSPGSDSHHGGKNSLSNSSGASADAGSTHISSREGVGTASGAEEDAPASSEQASAQSEPSPAPPAQPQIYPWMRKLHISHDNIGGPEGKRARTAYTRYQTLELEKEFHFNRYLTRRRRIEIAHALCLSERQIKIWFQNRRMKWKKDNKLKSMSMAAAGGAFRP

SEQ ID NO: 56 - DNA, 1657 bp, Homo sapiens
gggtgctatagacgcacaaacgaccgcgagccacaaatcaagcacacatatcaaaaaacaaatgagctcttattttgtaaactcattttgcggtcgctatccaaatggcccggactaccagttgcataattatggagatcatagttccgtgagcgagcaattcagggactcggcgagcatgcactccggcaggtacggctacggctacaatggcatggatctcagcgtcggccgctcgggctccggccactttggctccggagagcgcgcccgcagctacgctgccagcgccagcgcggcgcccgccgagcccaggtacagccagccggccacgtccacgcactctcctcagcccgatccgctgccctgctccgccgtggccccctcgcccggcagcgacagccaccacggcgggaaaaactccctaagcaactccagcggcgcctcggccgacgccggcagcacccacatcagcagcagagagggggttggcacggcgtccggagccgaggaggacgcccctgccagcagcgagcaggcgagtgcgcagagcgagccgagcccggcgccgcccgcccaaccccagatctacccctggatgcgcaagctgcacataagtcatgacaacataggcggcccggaaggcaaaagggcccggacggcctacacgcgctaccagaccctggagctggagaaggagttccacttcaaccgttacctgacccgcagaaggaggattgaaatagcacatgctctttgcctctccgagagacaaattaaaatctggttccaaaaccggagaatgaagtggaaaaaagataataagctgaaaagcatgagcatggccgcggcaggaggggccttccgtccctgagtatctgagcgtttaaagtactgagcagtattagcggatcccgcgtagtgtcagtactaaggtgactttctgaaactcccttgtgttccttctgtgaagaagccctgttctcgttgccctaattcatcttttaatcatgagcctgtttattgccattatagcgcctgtataagtagatctgctttctgttcatctctttgtcctgaatggctttgtcttgaaaaaaaatagatgttttaacttatttatatgaagcaagctgtgttacttgaagtaactataacaaaaaaagaaaagagaaaaaaaaacacacaaaaagtcccccttcaatctcgtttagtgccaatgttgtgtgttgcactcaagttgtttaactgtgcatgtgcgtggaagtgttcctgtctcaatagctccaagctgttaaagatatttttattcaaactacctatattccttgtgtaattaatgctgttgtagaggtgacttgatgagacacaacttgttcgacgtgtagtgactagtgactctgtgatgaaaactgtgactccaagcggtgtgtccctgcgtgcctttataggaccctttgcacgaactctggaagtggctcttataagcgcagcttcagtgatgtatgtttttgtgaacaaagttacaaatattgtccaagtctggctgttttaagcaaactgtgatcagcttttttttttttttttttttttttgtatttgtttttaaggaaaaaatactgactggaacaaaaaataaactttctattgtaagttc

SEQ ID NO: 57 - protein, 340 aa, Homo sapiens
MSFPNSSPAANTFLVDSLISACRSDSFYSSSASMYMPPPSADMGTYGMQTCGLLPSLAKREVNHQNMGMNVHPYIPQVDSWTDPNRSCRIEQPVTQQVPTCSFTTNIKEESNCCMYSDKRNKLISAEVPSYQRLVPESCPVENPEVPVPGYFRLSQTYATGKTQEYNNSPEGSSTVMLQLNPRGAAKPQLSAAQLQMEKKMNEPVSGQEPTKVSQVESPEAKGGLPEERSCLAEVSVSSPEVQEKESKEEIKSDTPTSNWLTAKSGRKKRCPYTKHQTLELEKEFLFNMYLTRERRLEISKSVNLTDRQVKIWFQNRRMKLKKMSRENRIRELTANLTFS

SEQ ID NO: 58 - DNA, 1814 bp, Homo sapiens
cggggaatgttttcctagagatgtcagcctacaaaggacacaatctctcttcttcaaattcttccccaaaatgtcctttcccaacagctctcctgctgctaatacttttttagtagattccttgatcagtgcctgcaggagtgacagtttttattccagcagcgccagcatgtacatgccaccacctagcgcagacatggggacctatggaatgcaaacctgtggactgctcccgtctctggccaaaagagaagtgaaccaccaaaatatgggtatgaatgtgcatccttatatacctcaagtagacagttggacagatccgaacagatcttgtcgaatagagcaacctgttacacagcaagtccccacttgctccttcaccaccaacattaaggaagaatccaattgctgcatgtattctgataagcgcaacaaactcatttcggccgaggtcccttcgtaccagaggctggtccctgagtcttgtcccgttgagaaccctgaggttcccgtccctggatattttagactgagtcagacctacgccaccgggaaaacccaagagtacaataatagccccgaaggcagctccactgtcatgctccagctcaaccctcgtggcgcggccaagccgcagctctccgctgcccagctgcagatggaaaagaagatgaacgagcccgtgagcggccaggagcccaccaaagtctcccaggtggagagccccgaggccaaaggcggccttcccgaagagaggagctgcctggctgaggtctccgtgtccagtcccgaagtgcaggagaaggaaagcaaagaggaaatcaagtctgatacaccaaccagcaattggctcactgcaaagagtggcagaaagaagaggtgcccttacactaagcaccaaacgctggaattagaaaaagagttcttgttcaatatgtacctcacccgcgagcgccgcctagagatcagtaagagcgttaacctcaccgacaggcaggtcaagatttggtttcaaaaccgccgaatgaaactcaagaagatgagccgagagaaccggatccgagaactgaccgccaacctcacgttttcttaggtctgaggccggtctgaggccggtcagaggccaggattggagagggggcaccgcgttccagggcccagtgctggaggactgggaaagcggaaacaaaaccttcaccgctctttgtttgttgttttgttgtattttgttttcctgctagaatgtgactttggggtcattatgttcgtgctgcaagtgatctgtaatccctatgagtatatatatatatatatatatatatatataaaaacttagcacgtgtaatttattattttttcatcgtaatgcagggtaactattattgcgcattttcatttgggtcttaacttattggaactgtagagcatccatccatccatccatccagcaatgtgactttttcatgtctttcctaacacaaaaggtctatgtgtgtggttagtccatgaactcatggcattttgaatacatccagtactttaaaaatgacatatatatttaaaaaaaaaagattaagaaaacccacaagttggagggagggggacttaaaaagcacattacaatgtatcttttcacaaatgaatttagcagttgtccttggtgagatgggatattggcgatttatgccttgtagcctttcccttgtggtgcatctgtggtttggtagaagtacaacagcaacctgtcctttctgtgcatgttctggtcgcatgtataatgcaataaactctggaaatgagttcaaaaaaaaaaa

SEQ ID NO: 59 - protein, 498 aa, Homo sapiens
MTVFLSFAFLAAILTHIGCSNQRRSPENSGRRYNRIQHGQCAYTFILPEHDGNCRESTTDQYNTNALQRDAPHVEPDFSSQKLQHLEHVMENYTQWLQKLENYIVENMKSEMAQIQQNAVQNHTATMLEIGTSLLSQTAEQTRKLTDVETQVLNQTSRLEIQLLENSLSTYKLEKQLLQQTNEILKIHEKNSLLEHKILEMEGKHKEELDTLKEEKENLQGLVTRQTYIIQELEKQLNRATTNNSVLQKQQLELMDTVHNLVNLCTKEGVLLKGGKREEEKPFRDCADVYQAGFNKSGIYTIYINNMPEPKKVFCNMDVNGGGWTVIQHREDGSLDFQRGWKEYKMGFGNPSGEYWLGNEFIFAITSQRQYMLRIELMDWEGNRAYSQYDRFHIGNEKQNYRLYLKGHTGTAGKQSSLILHGADFSTKDADNDNCMCKCALMLTGGWWFDACGPSNLNGMFYTAGQNHGKLNGIKWHYFKGPSYSLRSTTMMIRPLDF

SEQ ID NO: 60 - DNA, 4367 bp, Homo sapiens
gccctaagccatcagcaatccttagtataggggcacactcatgcattcctgtcaagtcatcttgtgaaaggctgcctgcttccagcttggcttggatgtgcaaccttaataaaactcactgaggtctgggagaaaatagcagatctgcagcagatagggtagaggaaagggtctagaatatgtacacgcagctgactcaggcaggctccatgctgaacggtcacacagagaggaaacaataaatctcagctactatgcaataaatatctcaagttttaacgaagaaaaacatcattgcagtgaaataaaaaattttaaaattttagaacaaagctaacaaatggctagttttctatgattcttcttcaaacgctttctttgagggggaaagagtcaaacaaacaagcagttttacctgaaataaagaactagttttagaggtcagaagaaaggagcaagttttgcgagaggcacggaaggagtgtgctggcagtacaatgacagttttcctttcctttgctttcctcgctgccattctgactcacatagggtgcagcaatcagcgccgaagtccagaaaacagtgggagaagatataaccggattcaacatgggcaatgtgcctacactttcattcttccagaacacgatggcaactgtcgtgagagtacgacagaccagtacaacacaaacgctctgcagagagatgctccacacgtggaaccggatttctcttcccagaaacttcaacatctggaacatgtgatggaaaattatactcagtggctgcaaaaacttgagaattacattgtggaaaacatgaagtcggagatggcccagatacagcagaatgcagttcagaaccacacggctaccatgctggagataggaaccagcctcctctctcagactgcagagcagaccagaaagctgacagatgttgagacccaggtactaaatcaaacttctcgacttgagatacagctgctggagaattcattatccacctacaagctagagaagcaacttcttcaacagacaaatgaaatcttgaagatccatgaaaaaaacagtttattagaacataaaatcttagaaatggaaggaaaacacaaggaagagttggacaccttaaaggaagagaaagagaaccttcaaggcttggttactcgtcaaacatatataatccaggagctggaaaagcaattaaacagagctaccaccaacaacagtgtccttcagaagcagcaactggagctgatggacacagtccacaaccttgtcaatctttgcactaaagaaggtgttttactaaagggaggaaaaagagaggaagagaaaccatttagagactgtgcagatgtatatcaagctggttttaataaaagtggaatctacactatttatattaataatatgccagaacccaaaaaggtgttttgcaatatggatgtcaatgggggaggttggactgtaatacaacatcgtgaagatggaagtctagatttccaaagaggctggaaggaatataaaatgggttttggaaatccctccggtgaatattggctggggaatgagtttatttttgccattaccagtcagaggcagtacatgctaagaattgagttaatggactgggaagggaaccgagcctattcacagtatgacagattccacataggaaatgaaaagcaaaactataggttgtatttaaaaggtcacactgggacagcaggaaaacagagcagcctgatcttacacggtgctgatttcagcactaaagatgctgataatgacaactgtatgtgcaaatgtgccctcatgttaacaggaggatggtggtttgatgcttgtggcccctccaatctaaatggaatgttctatactgcgggacaaaaccatggaaaactgaatgggataaagtggcactacttcaaagggcccagttactccttacgttccacaactatgatgattcgacctttagatttttgaaagcgcaatgtcagaagcgattatgaaagcaacaaagaaatccggagaagctgccaggtgagaaactgtttgaaaacttcagaagcaaacaatattgtctcccttccagcaataagtggtagttatgtgaagtcaccaaggttcttgaccgtgaatctggagccgtttgagttcacaagagtctctacttggggtgacagtgctcacgtggctcgactatagaaaactccactgactgtcgggctttaaaaagggaagaaactgctgagcttgctgtgcttcaaactactactggaccttattttggaactatggtagccagatgataaatatggttaatttcatgtaaaacagaaaaaaagagtgaaaaagagaatatacatgaagaatagaaacaagcctgccataatcctttggaaaagatgtattataccagtgaaaaggtgttatatctatgcaaacctactaacaaattatactgttgcacaattttgataaaaatttagaacagcattgtcctctgagttggttaaatgttaatggatttcagaagcctaattccagtatcatacttactagttgatttctgcttacccatcttcaaatgaaaattccatttttgtaagccataatgaactgtagtacatggacaataagtgtgtggtagaaacaaactccattactctgatttttgatacagttttcagaaaaagaaatgaacataatcaagtaaggatgtatgtggtgaaaacttaccacccccatactatggttttcatttactctaaaaactgattgaatgatatataaatatatttatagcctgagtaaagttaaaagaatgtaaaatatatcatcaagttcttaaaataatatacatgcatttaatatttcctttgatattatacaggaaagcaatattttggagtatgttaagttgaagtaaaagcaagtactctggagcagttcattttacagtatctacttgcatgtgtatacatacatgtaacttcattattttaaaaatatttttagaactccaatactcaccctgttatgtcttgctaatttaaattttgctaattaactgaaacatgcttaccagattcacactgttccagtgtctataaaagaaacactttgaagtctataaaaaataaaataattataaatatcattgtacatagcatgtttatatctgcaaaaaacctaatagctaattaatctggaatatgcaacattgtccttaattgatgcaaataacacaaatgctcaaagaaatctactatatcccttaatgaaatacatcattcttcatatatttctccttcagtccattcccttaggcaatttttaatttttaaaaattattatcaggggagaaaaattggcaaaactattatatgtaagggaaatatatacaaaaagaaaattaatcatagtcacctgactaagaaattctgactgctagttgccataaataactcaatggaaatattcctatgggataatgtattttaagtgaatttttggggtgcttgaagttactgcattattttatcaagaagtcttctctgcctgtaagtgtccaaggttatgacagtaaacagtttttattaaaacatgagtcactatgggatgagaaaattgaaataaagctactgggcctcctctcataaaagagacagttgttggcaaggtagcaataccagtttcaaacttggtgacttgatccactatgccttaatggtttcctccatttgagaaaataaagctattcacattgttaagaaaaatactttttaaagtttaccatcaagtcttttttatatttatgtgtctgtattctacccctttttgccttacaagtgatatttgcaggtattataccatttttctattcttggtggcttcttcatagcaggtaagcctctccttctaaaaacttctcaactgttttcatttaagggaaagaaaatgagtattttgtccttttgtgttcctacagacactttcttaaaccagtttttggataaagaatactatttccaaactcatattacaaaaacaaaataaaataataaaaaaagaaagcatgatatttactgttttgttgtctgggtttgagaaatgaaatattgtttccaattatttataataaatcagtataaaatgttttatgattgttatgtgtattatgtaatacgtacatgtttatggcaatttaacatgtgtattcttttaattgtttcagaataggataattaggtattcgaattttgtctttaaaattcatgtggtttctatgcaaagttcttcatatcatcacaacattatttgatttaaataaaattgaaagtaatatttgtgcaa

SEQ ID NO: 61 - protein, 782 aa, Homo sapiens
MAAAAAAGPSPGSGPGDSPEGPEGEAPERRRKAHGMLKLYYGLSEGEAAGRPAGPDPLDPTDLNGAHFDPEVYLDKLRRECPLAQLMDSETDMVRQIRALDSDMQTLVYENYNKFISATDTIRKMKNDFRKMEDEMDRLATNMAVITDFSARISATLQDRHERITKLAGVHALLRKLQFLFELPSRLTKCVELGAYGQAVRYQGRAQAVLQQYQHLPSFRAIQDDCQVITARLAQQLRQRFREGGSGAPEQAECVELLLALGEPAEELCEEFLAHARGRLEKELRNLEAELGPSPPAPDVLEFTDHGGSGFVGGLCQVAAAYQELFAAQGPAGAEKLAAFARQLGSRYFALVERRLAQEQGGGDNSLLVRALDRFHRRLRAPGALLAAAGLADAATEIVERVARERLGHHLQGLRAAFLGCLTDVRQALAAPRVAGKEGPGLAELLANVASSILSHIKASLAAVHLFTAKEVSFSNKPYFRGEFCSQGVREGLIVGFVHSMCQTAQSFCDSPGEKGGATPPALLLLLSRLCLDYETATISYILTLTDEQFLVQDQFPVTPVSTLCAEARETARRLLTHYVKVQGLVISQMLRKSVETRDWLSTLEPRNVRAVMKRVVEDTTAIDVQVGLLYEEGVRKAQSSDSSKRTFSVYSSSRQQGRYAPSYTPSAPMDTNLLSNIQKLFSERIDVFSPVEFNKVSVLTGIIKISLKTLLECVRLRTFGRFGLQQVQVDCHFLQLYLWRFVADEELVHLLLDEVVASAALRCPDPVPMEPSVVEVICERG

SEQ ID NO: 62 - DNA, 2546 bp, Homo sapiens
ttcctttccagcctcacgcccgtgggctgcagttggaacgatggcggcggcagctgccgccgggcctagcccggggtctggacctggggactccccagaagggcccgagggggaggctccggagcgtcggcggaaggcgcacgggatgctgaagctttactacggcctctcggaaggggaggcggcgggacgccccgcggggcccgaccccctggacccgactgatctgaacggggcgcacttcgacccggaagtttacctagacaagctgcgtagagagtgccctctggcccagttgatggacagtgagacggacatggtgcggcagatccgggctctagacagcgacatgcagaccctggtctatgagaactacaacaagttcatctcagccacagacaccatccggaagatgaagaacgatttccggaagatggaggatgagatggaccggctggccaccaacatggcagtgatcaccgacttcagcgctcgcatcagcgccacgctgcaggaccgccacgagcgcatcaccaagctggcaggggtccacgcgctgctgcggaagctgcagttcctctttgagctgccctcgcgcctcaccaagtgcgtggaactgggcgcctatgggcaggcggtgcgctaccagggccgcgcgcaggccgtgctgcagcagtaccaacacctgccctcgttccgcgccatccaggacgactgccaggtcatcacggcccgcctggcccagcagctgcggcagcgctttagggagggcggctcaggcgccccggagcaggcagagtgcgtggagctgctgctggccctgggcgagcctgcggaggagctgtgcgaggagttcctggcgcacgcccgcggccggctggagaaggagctgagaaacctggaggccgagctggggccctcacctccggctcccgacgtgttagagttcaccgaccatggaggcagtggcttcgtgggcggcctctgccaggtggcggcggcctaccaggagctgtttgcggcccagggcccagcaggtgccgagaagctggcggccttcgcccggcagctgggcagccgctattttgcgctggtggagcggcggctggcgcaggagcagggtggtggtgacaactcactgctggtgcgggcgctggaccgcttccaccggcgcttgcgggctcccggggccctgctggccgctgccgggctcgcagacgctgccacggagatcgtggaacgagtggcccgcgagcgcctgggccaccacctgcagggtctccgggcggccttcctgggctgcctgacagacgtccgccaggcgctggcagcacctcgcgtggctgggaaggagggccctggcctggccgagttgctggccaatgtggccagctccatcctgagccacattaaggcctctctggcagcagtgcaccttttcaccgccaaagaggtgtccttctccaacaagccctacttccggggtgagttctgcagtcagggtgtccgtgagggcctcatcgtgggcttcgtccactctatgtgccagacggctcagagcttctgcgacagccctggggagaaggggggtgccacaccacctgccctgctcctgctgctctcccgcctctgcctggactacgagacggccaccatctcctacatcctcactctcactgatgaacagtttctggtgcaggatcagttcccagtgacgcccgtgagcacgctgtgtgcagaggccagggaaacggcgcggcggctgctgacccactacgtgaaggtgcagggcctggtcatatcacagatgctgcgcaagagcgtggagactcgcgactggctcagcactctggagccccggaatgtgcgggccgtcatgaagcgggtggtggaggataccaccgccatcgacgtgcaggtggggctcctgtacgaagagggtgttcgcaaggcccagagcagcgactccagcaagaggactttctccgtgtacagcagctctcggcagcagggccgctacgcccccagctatacccccagtgccccgatggacaccaacctcttgagcaatatccagaagctattctctgaacgtattgatgtgttcagccctgtggagttcaacaaggtgtcggtgctgaccggcatcatcaagatcagcctgaagacgctgctggagtgtgtgcggctgcgcacctttgggcgcttcgggctgcagcaggtgcaagtggactgccactttctgcagctctacctgtggcgttttgtggccgacgaagaactcgtgcacttgctgctggacgaagtggtggcctctgctgccctgcgctgcccagaccctgtgcccatggagcccagtgtggttgaggtcatctgcgagcgcggctaggcgcagccgctgccatgcaccggtctgtccctgcaccccatggcacccaggatctggtctcggtggtccttccccgcaggcaggtgtcaggaccggcctaataaacatgtgtggcctcctcaaaaaaaaaaaaaaaaaaaaaaaaaaaaaaaaaaaa

SEQ ID NO: 63 - protein, 211 aa, Homo sapiens [sequence omitted]

SEQ ID NO: 64 - DNA, 4554 bp, Homo sapiens
  misc_feature (1286)..(1385): n is a, c, g, or t
  misc_feature (1537)..(1636): n is a, c, g, or t
  misc_feature (2100)..(2199): n is a, c, g, or t
  misc_feature (2574)..(2673): n is a, c, g, or t
  misc_feature (3156)..(3255): n is a, c, g, or t
  misc_feature (3496)..(3595): n is a, c, g, or t
ttcgctcccacccggtgccgcagattgcagctggcactggagggtgggcaagctcgagggaggggcgcggagcgcgcggacgcgcgcggggctttgatggatttagctgcttgcgcgagcgcgtgtgtgctccctgccgcggcggcgcccgggccctgccgggtccgcacgaaccccgagcgcttccgaggtgcgggtcccaggcccggaatccggggaggcgggggggggggcgggggcgggggcgggggaggggcgcggcggcggcggctataaccctctccccgccgccggccggctccacacgcgcgccctgcggagcccgcccaactccggcgagccggcctgcgcctactcctcctcctcctctcccggcggcggctgcggcggaggcgcgactcgccttcgcccgccctcaggcccgcgcgggcggcgcagcgaggccccgggcggcgggtggtggctgccagcggcgtcggccggccgctgcccggccccggcgagcggagggcggagcgcggcgccggagccgagggccgccgcggagggggtgctgggccgcgctgtgcccggccgggcggcggctgcaagaggaggccggaggcgagcgcggggccggcggtgggcgcgcagggcggctcgcagctcgcagccggggccgggccaggcgttcaggcaggtgatcggtgtggcggcggcggcggcggcggccccagactccctccggagttcttcttcggggctcgatgtccgcaaatatgcagaattaccggccgggtcgctcctgaagccagcgcggggagcgagcgcggcggcggccagcaccgggaacgcaccgaggaagaagcccagcccccgccctccgccccttccgtccccaccccctacccggcggcccaggaggctccccgcgctcgcggcgcgcactccctgtttctcctcctcctggctggcgctgcctgcctctccgcactcactgctcgccgggcgccgtccgccagctccgtgctccccgcgccaccctcctccgggccgcgctccctaagggatggtactgaatttcgccgccacaggagaccggctggagcgccgccccgcggcctcgcctctcctccgagcagccagcgcctcgggacgcgatgaggaccttggcttgcctgctgctcctcggctgcggatacctcgcccatgttctggccgaggttggtgccgcccccgcgccccgtctcacgctcggctcctccggcgcacaccccccgccggctggggcccacgggctctgcagnnnnnnnnnnnnnnnnnnnnnnnnnnnnnnnnnnnnnnnnnnnnnnnnnnnnnnnnnnnnnnnnnnnnnnnnnnnnnnnnnnnnnnnnnnnnnnnnnnnntgaccgtgtggcctctgcttgcaggaagccgagatcccccgcgaggtgatcgagaggctggcccgcagtcagatccacagcatccgggacctccagcgactcctggagatagactccgtaggtaaatcgcgccccttccctcgcgcgcgggnnnnnnnnnnnnnnnnnnnnnnnnnnnnnnnnnnnnnnnnnnnnnnnnnnnnnnnnnnnnnnnnnnnnnnnnnnnnnnnnnnnnnnnnnnnnnnnnnnnnagggcccctaatggcgggagctgtgaggggctgtgccgccaggtgcctgttccccagtggctcccaaagctggtctgtgggaagtgcggctggacaggcccagggcacagcgcacggggcattcacggtgttctccttccgcctgcagggagtgaggattctttggacaccagcctgacacgtgacggggtccatgccactaagcatgtgcccgagaagaggcccctgcccattcggaggaagagaagcatcggtgagtccaggaggccgcgatgggcagggcagggccgggtcggggtgagtccaggaggccgcgatgggcagggcagggccgggtggggaggaggagctgcccgctctcccagcgcagtggcctcatggcaagccacccgttccctcctccctaaaataggcctggccctggtgcctctggctctggcctctccgagggtgtctcctgcccnnnnnnnnnnnnnnnnnnnnnnnnnnnnnnnnnnnnnnnnnnnnnnnnnnnnnnnnnnnnnnnnnnnnnnnnnnnnnnnnnnnnnnnnnnnnnnnnnnnntgctcctgcccacccagcccctgagcctctgctcccagctcagcctctgctgcctgggaggaatcctggcctgtgggttaccctggttgccccccaggcccagctggagccgcctcagccctggggtggggccgtggtcgcagaggccggtccccgctcactgtgcccccgccgttgcagaggaagctgtccccgctgtctgcaagaccaggacggtcatttacgagattcctcggagtcaggtcgaccccacgtccgccaacttcctgatctggcccccgtgcgtggaggtgaaacgctgcaccggctgctgcaacacgagcagtgtcaagtgccagccctcccgcgtccaccaccgcagcgtcaaggtgagcnnnnnnnnnnnnnnnnnnnnnnnnnnnnnnnnnnnnnnnnnnnnnnnnnnnnnnnnnnnnnnnnnnnnnnnnnnnnnnnnnnnnnnnnnnnnnnnnnnnnctgcagcttgtaggttttcacctggtactgctacactccccaccacaaggtagtgtttctgggaggaggtcaggggtcaggctgctctctcctccctctcagcctgtccccggctcccagcacgtcgtgatgtccgaagctccatgcaggcattcatggccgggctctgttctctctggcaggtggccaaggtggaatacgtcaggaagaagccaaaattaaaagaagtccaggtgaggttagaggagcatttggagtgcgcctgcgcgaccacaagcctgaatccggattatcgggaagaggacacgggtgagtggctgccttcgtcggcatcgtgttggagaacaggtcttcagagccttgcttttggggtgttaggtggcccccttgagcgcaacgcttactgctgtgagcatctgggctgctgttgaaggattcgttgccctgctcccgggccagatgcctgcgggggagacggatccnnnnnnnnnnnnnnnnnnnnnnnnnnnnnnnnnnnnnnnnnnnnnnnnnnnnnnnnnnnnnnnnnnnnnnnnnnnnnnnnnnnnnnnnnnnnnnnnnnnntctcggtgccagggtgctggccttctcttctggaaagataaagaaatgccgtaggtatttgttgcttcagttcttcaccccgacggccgtccctcggcccactcaccgccctgcccttttgttaacaggaaggcctagggagtcaggtaaaaaacggaaaagaaaaaggttaaaacccacctaaagcagccaaccaggtaggactgtctgccggacactgagtcctgctaggcatgcaagnnnnnnnnnnnnnnnnnnnnnnnnnnnnnnnnnnnnnnnnnnnnnnnnnnnnnnnnnnnnnnnnnnnnnnnnnnnnnnnnnnnnnnnnnnnnnnnnnnnnctgcagatgtgaggtgaggatgagccgcagccctttcctgggacatggatgtacatggcgtgttacattcctgaacctactatgtacggtgctttattgccagtggcggtctttgttctcctccgtgaaaaactgtgtccgagaacactcgggagaacaaagagacagtgcacatttgtttaatgtgacatcaagcaagtattgtagcactcggtgaagcagtaagaagcttccttgtcaaaaagagagagagagagagagagagagaaaacaaaaccacaaatgacaaaaacaaaacggactcacaaaaatatctaaactcgatgagatggagggtcgccccgtgggatggaagtgcagaggtctcagcagactggatttctgtccgggtggtcacagctgcttttttgccgaggatgcagagcctgctttgggaacgactccagaggggtgcgtggtgggctctgcaggggcccgcaggaagcaggaatgtcttggaaaccgccacggaaactttagaaaccacacctcctcgctgtagtatttaagcccatacagaaaccttcctgagagccttaagtggtttttttttttgtttttgttttgttttttttttttttgtttttttttttttttttttacaccataaagtgattattaagctttttactcttttgctagctttttttttttttttttttaattatctctcggatgacattcacacccacaacacacaggctgctgtaactgtcaggacagtgcgacggtatttttcctagcaagatgcaaactaatgagatgtattaaaataaacatggtatacctcctatgcatcatttcctaaatctttctggctttgtgtttctcccttaccctgctttatttcttaatttaagccattttgaagaactatgcgtcaaccaatcgtacgcctcctgcggcactgcccagagccc

SEQ ID NO: 65 - protein, 798 aa, Homo sapiens
MEAGEGKERVPKQRQVLIFFVLLGIAQASCQPRHYSVAEETESGSFVANLLKDLGLEIGELAVRGARVVSKGKKMHLQFDRQTGDLLLNEKLDREELCGPTEPCVLPFQVLLENPLQFFQAELRIRDVNDHSPVFLDKEILLKIPESITPGTTFLIERAQDLDVGTNSLQNYTISPNFHFHLNLQDSLDGIILPQLVLNRALDREEQPEIRLTLTALDGGSPPRSGTALVRIEVVDINDNVPEFAKLLYEVQIPEDSPVGSQVAIVSARDLDIGTNGEISYAFSQASEDIRKTFRLSAKSGELLLRQKLDFESIQTYTVNIQATDGGGLSGTCVVFVQVMDLNDNPPELTMSTLINQIPENLQDTLIAVFSVSDPDSGDNGRMVCSIQDDLPFFLKPSVENFYTLVISTALDRETRSEYNITITVTDFGTPRLKTEHNITVLVSDVNDNAPAFTQTSYTLFVRENNSPALHIGSVSATDRDSGTNAQVTYSLLPPQDPHLPLASLVSINADNGHLFALQSLDYEALQAFEFRVGAADRGSPALSSEALVRVLVLDANDNSPFVLYPLQNGSAPCTELVPRAAEPGYLVTKVVAVDGDSGQNAWLSYQLLKATEPGLFGVWAHNGEVRTARLLRERDAAKQRLVVLVKDNGEPPRSATATLHVLLVDGFSQPYLLLPEAAPAQAQADLLTVYLVVALASVSSLFLFSVLLFVAVRLCRRSRAASVGRCSVPEGPFPGQMVDVSGTGTLSQSYQYEVCLTGGSGTNEFKFLKPIIPNFVAQGAERVSEANPSFRKSFEFT

SEQ ID NO: 66 - DNA, 2779 bp, Homo sapiens
ccttacccagatactcagctaaagaagcagcaagcaggaagaggaggctttctaaggcggtcgctccgggaaatccgggccctaggattgtccactcatcccagtatcagcgagatacggggagatagagttagcgacaacgtgagccagagctggagcacgtttggtgagagaccagaaagcaatggaggccggagaggggaaggagcgcgttccgaaacaaaggcaagtcctgatattctttgttttgctgggcatagctcaggctagttgccagcctaggcactattcagtggccgaggaaacggagagtggctcctttgtggccaatttgttaaaagacctggggctggagataggagaacttgctgtgaggggggccagggtcgtttccaaaggaaaaaaaatgcatttgcagttcgataggcagaccggggatttgttgttaaatgagaaattggaccgggaggagctgtgcggccccacagagccctgtgtcctacctttccaggtgttactagaaaatcccttgcagttttttcaggcggagctacggattagggacgtaaatgatcattccccagttttcctagacaaagaaatacttttgaaaattccagaaagtatcactcctggaactactttcttaatagaacgtgcccaggacttggatgtaggaaccaacagtctccaaaattacacaatcagtcccaatttccactttcatcttaatttacaagacagtctcgatggcataatattaccacagctggtgctgaacagagccctggatcgcgaggagcagcctgagatcaggttaaccctcacagcgctagatggcgggagtccacccaggtccggcacggccctggtacggattgaagttgtggacatcaatgacaacgtcccagagtttgcaaagctgctctatgaggtgcagatcccggaggacagccccgttggatcccaggttgccatcgtctctgccagggatttagacattggaactaatggagaaatatcttatgcattttcccaagcatctgaagacattcgcaaaacgtttcgattaagtgcaaaatcgggagaactgcttttaagacagaaactggatttcgaatccatccagacatacacagtaaatattcaggcgacagatggtgggggcctatctggaacttgtgtggtatttgtccaagtgatggatttgaatgacaatcctccggaactaactatgtcgacacttatcaatcagatcccagaaaacttgcaggacaccctcattgctgtattcagcgtttcagatcctgactccggagacaacggaaggatggtgtgctccatccaagatgatcttccttttttcttgaaaccttctgttgagaacttttacactctggtgataagcacggccctggaccgggagaccagatccgaatacaacatcaccatcaccgtcaccgacttcgggacacccaggctgaaaaccgagcacaacataaccgtgctggtctccgacgtcaatgacaacgcccccgccttcacccaaacctcctacaccctgttcgtccgcgagaacaacagccccgccctgcacatcggcagcgtcagcgccacagacagagactcgggcaccaacgcccaggtcacctactcgctgctgccgccccaggacccgcacctgcccctcgcctccctggtctccatcaacgcggacaacggccacctgttcgctctccagtcgctggactacgaggccctgcaggcgttcgagttccgcgtgggcgccgcagaccgcggctccccggcgttgagcagcgaggcgctggtgcgcgtgctggtgctggacgccaacgacaactcgcccttcgtgctgtacccgctgcagaacggctccgcgccctgcaccgagctggtgccccgggcggccgagccgggctacctggtgaccaaggtggtggcggtggacggcgactcgggccagaacgcctggctgtcgtaccagctgctcaaggccacggagcccgggctgttcggcgtgtgggcgcacaatggcgaggtgcgcaccgccaggctgctgagggagcgcgacgctgccaagcagaggctggtggtgctggtcaaggacaatggcgagcctccgcgctcggccaccgccacgctgcacgtgctcctggtggacggcttctcccagccctacctgctgctcccggaggcggcaccggcccaggcccaggccgacttgctcaccgtctacctggtggtggcgttggcctcggtgtcttcgctcttcctcttctcggtgctcctgttcgtggcggtgcggctgtgcaggaggagcagggcggcctcggtgggtcgctgctcggtgcccgagggcccctttccagggcagatggtggacgtgagcggcaccgggaccctgtcccagagctaccagtacgaggtgtgtctgactggaggctccgggacaaatgagttcaagttcctgaagccaattatccccaacttcgttgctcagggtgcagagagggttagcgaggcaaatcccagtttcaggaagagctttgaattcacttaagtgttaataaggatctactgaggctagtctcgtttaatttgtggaaagtccttttttactgctttgcccattggaggtgtctccttttattagaaagtaaccatcttattccaattctatgcatgttactggtatttataaatgtatgagtttttttgcggtataataaatgtaaattttctttgtattctaaaaaaa

SEQ ID NO: 67 - protein, 796 aa, Homo sapiens
MEAGGERFLRQRQVLLLFVFLGGSLAGSESRRYSVAEEKEKGFLIANLAKDLGLRVEELAARGAQVVSKGNKQHFQLSHQTGDLLLNEKLDREELCGPTEPCILHFQILLQNPLQFVTNELRIIDVNDHSPVFFENEMHLKILESTLPGTVIPLGNAEDLDVGRNSLQNYTITPNSHFHVLTRSRRDGRKYPELVLDKALDREEQPELSLTLTALDGGSPPRSGTAQINIQVLDINDNAPEFAQPLYEVAVLENTPVNSVIVTVSASDLDTGSFGTISYAFFHASEEIRKTFQLNPITGDMQLVKYLNFEAINSYEVDIEAKDGGGLSGKSTVIVQVVDVNDNPPELTLSSVNSPIPENSGETVLAVFSVSDLDSGDNGRVMCSIENNLPFFLKPSVENFYTLVSEGALDRETRSEYNITITITDLGTPRLKTKYNITVLVSDVNDNAPAFTQISYTLFVRENNSPALHIGSVSATDRDSGTNAQVTYSLLPPQDPHLPLSSLVSINADNGHLFALRSLDYEALQAFEFRVGATDRGSPALSSEALVRVLVLDANDNSPFVLYPLQNGSAPCTELVPRAAEPGYLVTKVVAVDGDSGQNAWLSYQLLKATEPGLFGVWAHNGEVRTARLLSERDAAKHRLVVLVKDNGEPPRSATATLHVLLVDGFSQPYLPLPEAAPAQAQADLLTVYLVVALASVSSLFLFSVLLFVAVRLCRRSRAASVGRCSVPEGPFPGQMVDVSGTGTLSQSYQYEVCLTGGSGTNEFKFLKPIIPNFVAQGAERVSEANPSFRKSFEFS

SEQ ID NO: 68 - DNA, 3593 bp, Homo sapiens
tgctcgtagataaaagtgcattttatttccctagattgcatttatttaattcatataacatgagaaactcctccagtagcgtcaactagggttgataagaataatcgataaagcaaaataaaaacaccttctccaagattttgtaactgcaagcgaacgcatggtggcgctgttgactaagaaggcgaattaaaccacaggcattgtgcatgctcggtgacgcacggatccagtgtggtaaaccagcggttgagagcccaggcagatttttgagccagcaagtctgagcctctggaaaggcttattcactaggccgtctacaaaggttgtggggcaaaagactgtttcccagctctgtctgaggttcagcttggcgacattccctggaagagcgtgacggaaagtgcaatggaggcgggaggagagcgatttcttagacaaaggcaagtcttgcttctctttgtttttctgggagggtctctggctgggtccgagtcaagacgctattctgtggctgaggaaaaagagaagggctttttaatagccaacctagcaaaggatctgggactaagggtagaggaactggccgcgaggggggcccaagttgtgtccaaagggaacaaacagcattttcagctcagtcatcagacaggtgatttgctcctgaatgagaaattggaccgggaggagctatgcggccccacagaaccatgcatactacattttcagatattactgcaaaaccctttgcaattcgttacaaacgagctccgtatcatagatgtaaatgaccattctccggtattctttgaaaatgaaatgcatctgaaaatcctagaaagcactctgccaggaacagtaattcctttgggaaatgctgaggacttggatgtgggaagaaacagcctccaaaactacactatcactccgaattcccacttccacgtactcactcgcagtcgtagggacggaaggaagtacccggaactagtactggataaagcgctcgatcgggaggagcagccggaactcagcttaacgctcaccgcgctggacggcggctctccccctcggtctgggacagcccagataaacatccaggtcttagatataaacgacaatgcaccagaatttgcacagccgctctatgaggttgcagttctagagaatacccccgttaactctgtcattgtcactgtctcggcttctgacttagatacaggaagttttgggacaatatcatatgcattttttcatgcttctgaagaaattcgcaaaacttttcagctaaatccaattactggtgatatgcaactggtcaaatatttgaattttgaagcgattaatagttatgaagtcgacatcgaggccaaggatggcggaggcctatccggaaagtctacagtcatagtccaggtggttgatgtcaacgacaacccaccggaactgaccttgtcttcagtaaacagccctattcctgagaactcgggagagactgtactggctgttttcagtgtttctgatctagactctggagacaacggaagagtgatgtgttccattgagaacaatctccccttcttcctgaaaccatctgtagagaatttttacaccctagtgtcagaaggcgcgctggacagagagaccagatccgagtacaacattaccatcactatcactgacctggggacacccaggctgaaaaccaagtacaacataaccgtgctggtctccgacgtcaatgacaacgcccccgccttcacccaaatctcctacaccctgttcgtccgcgagaacaacagccccgccctgcacatcggcagtgtcagcgccacagacagagactcaggcaccaacgcccaggtaacctactcgctgctgccgccccaggacccgcacctgcccctctcttccctggtctccatcaacgcggacaacggccacctgtttgccctcaggtcgctggactacgaggccctgcaggcgttcgagttccgcgtgggcgccacagaccgtggctccccggctttgagcagcgaggcgctggtgcgcgtgctggtgctggacgccaacgacaactcgcccttcgtgctgtacccgctgcagaacggctccgcgccctgcaccgagctggtgccccgggcggctgagccgggctacctggtgaccaaggtggtggcggtggacggcgactcgggccagaacgcctggctgtcgtaccagctgctcaaggccacggagcccgggctgttcggcgtgtgggcgcacaatggcgaagtgcgcaccgccaggctgctgagcgagcgcgacgcggccaagcacaggctggtggtgctggtcaaggacaatggcgagcctccgcgctcggccaccgccacgctgcatgtgctcctggtggacggcttctcccagccctacctgcctctcccggaggcggcaccggcccaggcccaggccgacttgctcaccgtctacctggtggtggcattggcctcggtgtcttcgctcttcctcttttcggtgctcctgttcgtggcggtgcggctgtgcaggaggagcagggcggcctcggtgggtcgctgctcggtgcccgagggcccctttccagggcagatggtggacgtgagcggcaccgggaccctgtcccagagctaccagtacgaggtgtgtctgactggaggctccgggacaaatgagttcaagttcctgaagccaattatccccaacttcgttgctcagggtgcagagagggttagcgaggcaaatcccagtttcaggaagagctttgaattcagttaagtgttaataaggatctactgagcctcgtcttagttaatctgtggaaagtccttttttactgctttgtccattggagaggtcttttttggtctggttcaaggcaagtagcaagaatagagcaaaatatcaaatccagggatggcttaggtttcattaacagtactggaaagtagttgtgtggctctgaatgttttgtatttcaatcgagaatccttagtcgatagaacattttgtttatatattgattctactttttctgtagttaatccttgcatattctcctttcatcctggcttgccaacgcagtcttaattccgccttttttttttctaatggggagcaaaaagaaattcactgtcttttaatagtgatttcaaatagcttattaaaataactccattcaaattttacattataaagcaatgtagagagagttccaaaccaccaattttataatttcccttgttgaatatattcatataatgtgttctataatatgcccaaagcagctttgtctatagttaacaaagttttaaggatagacaagaatgtgttttctttaataaatagtaatatatcatctttttagggatatagtactcaaatgaaagtaatttagttcattttctgtgttgacatttgcaattaatatttcaatattttatgtgcttatattggccaaaatatggacacaaatatagactaatatgggtaattaccctttggtttatctaaagtgtgttcatgatgactgaggaaaaaaattaaacctatgccatttaaaaaaaaaaaaa

SEQ ID NO: 69 - protein, 794 aa, Homo sapiens [sequence omitted]

SEQ ID NO: 70 - DNA, 3030 bp, Homo sapiens
atgatgcaaactaaagtacagaacaagaaaaggcaagtggctttcttcattttattgatgctttggggagaggtgggttctgaatcgattcagtattccgtattggaggagacagaaagtggcacgtttgtggccaacttgacaaaggacctgggactgagggtgggggagctggcttcgcggggcgctcgggttgttttcaaagggaacagacaacatttgcagtttgatccacagacccatgatttactgctaaatgaaaaactggaccgggaggagctgtgtggctccactgagccgtgtgtgctacctttccaagtgttactggaaaaccccttgcagttttttcaggcttccttgcgagtcagagatataaatgaccacgccccggaattccctgccagagaaatgctcctgaaaatatcagaaattactatgccaggaaagatatttcctttgaaaatggcacacgatttagacaccggcagcaacggccttcagaggtacacaatcagctccaaccctcacttccacgttctcacccgcaatcgcagcgaaggcaggaagttcccggagctggtgctagacaaaccgttggaccgcgaggagcagccccaactcaggctaacgctgatcgcgctggatggcgggtctccgccccggtcagggacctccgagattcagatccaggttttggacatcaatgacaacgtccccgagtttgctcaggagctctatgaagcacaagtccctgagaacaaccccctcggctctctggttattaccgtctcagccagagatttagatgcaggatcgtttgggaaggtatcttacgccctgtttcaagtcgatgacgtcaaccaacccttcgaaataaacgcaatcacaggagaaattcggctgagaaaggctttggattttgaggaaattcagtcttatgacgtggatgttgaggctacagatggtggaggcctatcaggaaaatgctctttagtcgtcagggtcctggacgtgaatgacaatgcccctgaactcaccatgtcgttcttcatcagcctcatcccagaaaacttaccagagatcacagtggcagttttcagtgtttcagatgcagactctggacataaccaacaggttatttgttcaatagagaacaatctcccctttctactaagaccttccgtggagaatttctacaccctggtaacagaaggcgcgctggacagagagagcagagccgagtacaacatcactatcacggtcactgatttggggacaccaaggctgaaaacccagcagagcataactgtgcaggtctccgacgtcaatgacaacgtccccgccttcacccaaacctcctacaccctgttcgtccgcgagaacaacagccccgccctgcacatcggcagcgtcagcgccacagacagagactcaggcatcaacgcccaggtcacctactcgctgctgccgccccaggacccgcacctgcccctctcttccctggtctccatcaacgcggacaacggccacctgtttgccctcaggtcgctggactacgaggccctgcagtctttcgagttccgcgtgggcgccacagaccgcggctccccggcgttgagcagcgaggcgctggtgcgcttgctggtgctggacgccaacgacaactcgcccttcgtgttgtacccgctgcagaacggctccgcgccctgcaccgagctggtgccccgggcggccgagccgggctacctggtgaccaaggtggtggcggtggacggcgactcgggccagaacgcctggctgtcgtaccagctgctcaaggccacggagctcggtctgttcggcgtgtgggcgcacaatggcgaggtgcgcaccgccaggctgctgagcgagcgagacgcagccaagcacaggctggtggtgcttgtcaaggacaatggcgagcctccgcgctcggccaccgccacgctgcacgtgctcctggtggacggcttctcccagccctacctgcctctccctgaggcggccccggcccaagcccaggccgactctctcaccgtctacctggtggtggcgttggcctcggtgtcgtcgctcttcctcttttcggtgctcctgttcgtggcggtgcggctgtgcaggaggagcagggcggcctcggtgggtcgctactcggtgcccgagggtccctttccagggcatctggtggatgtgagcggcaccgggaccctatcccagagctaccagtacaaggtgtgtctgacgggaggctcagaaacaaatgagttcaagttcctgaagccgattatgcccaacttccctcctcagggcactgagagagaaatggaagaaacccccacctctcggaatagcttcccgttcagttaagtgtgggattattttactaaatcttacttatgtttggagatctcttttaacttaaagttacatggtctgtttcttgtttattttacctctattctttaggttgaaattttatataaagtaagatactggtatcttagtatttcctgttcatgcttagtagtttattacttcacttgagggtacttgacaatatgaacaaaaagtaaatttttatttgcataattttaagcttttgaaattaaattatctattcttcccccccccaaaaaaaagtattgtaaatccttaagtaaaattgtatttctagctattggtaagagttgtttcactattgctatgtaggactgtttaaaatgtgagtatctgatattatttaatcctccaatgtctcattttgcagtaactcctacagtgtgtaacactaaaaataagaactaatgatggctaaacactaaagtagccattcatacttatgcatattttagtatcccataatagtcaatccaaaatttttgtgactatagactttactgaagtgtcaacacattagtttgtgagcctcatgtaagaacatgatggtctttttttaaaaaaaaagtcgtgccaattataagtgcttaataaatatttgctgaatgttactaa

SEQ ID NO: 71 - protein, 800 aa, Homo sapiens
MAVRELCFPRQRQVLFLFLFWGVSLAGSGFGRYSVTEETEKGSFVVNLAKDLGLAEGELAARGTRVVSDDNKQYLLLDSHTGNLLTNEKLDREKLCGPKEPCMLYFQILMDDPFQIYRAELRVRDINDHAPVFQDKETVLKISENTAEGTAFRLERAQDPDGGLNGIQNYTISPNSFFHINISGGDEGMIYPELVLDKALDREEQGELSLTLTALDGGSPSRSGTSTVRIVVLDVNDNAPQFAQALYETQAPENSPIGFLIVKVWAEDVDSGVNAEVSYSFFDASENIRTTFQINPFSGEIFLRELLDYELVNSYKINIQAMDGGGLSARCRVLVEVLDTNDNPPELIVSSFSNSVAENSPETPLAVFKINDRDSGENGKMVCYIQENLPFLLKPSVENFYILITEGALDREIRAEYNITITVTDLGTPRLKTEHNITVLVSDVNDNAPAFTQTSYTLFVRENNSPALHIGSVSATDRDSGTNAQVTYSLLPPQDPHLPLASLVSINADNGHLFALRSLDYEALQAFEFRVGATDRGSPALSREALVRVLVLDANDNSPFVLYPLQNGSAPCTELVPRAAEPGYLVTKVVAVDGDSGQNAWLSYQLLKATEPGLFGVWAHNGEVRTARLLSERDAAKHRLVVLVKDNGEPPRSATATLHLLLVDGFSQPYLPLPEAAPAQAQAEADLLTVYLVVALASVSSLFLLSVLLFVAVRLCRRSRAASVGRCSVPEGPFPGHLVDVRGAETLSQSYQYEVCLTGGPGTSEFKFLKPVISDIQAQGPGRKGEENSTFRNSFGFNIQ

SEQ ID NO: 72 - DNA, 3284 bp, Homo sapiens
gaagacacggacagatgaacttaaaagagaagctttagctgccaaagattgggaaagggaaaggacaaaaaagacccctgggctacacggcgtaggtgcagggtttcctactgctgttcttttatgctgggagctgtggctgtaaccaactaggaaataacgtatgcagcagctatggctgtcagagagttgtgcttcccaagacaaaggcaagtcctgtttctttttcttttttggggagtgtccttggcaggttctgggtttggacgttattcggtgactgaggaaacagagaaaggatcctttgtggtcaatctggcaaaggatctgggactagcagagggggagctggctgcaaggggaaccagggtggtttccgatgataacaaacaatacctgctcctggattcacataccgggaatttgctcacaaatgagaaactggaccgagagaagctgtgtggccctaaagagccctgtatgctgtatttccaaattttaatggatgatccctttcagatttaccgggctgagctgagagtcagggatataaatgatcacgcgccagtatttcaggacaaagaaacagtcttaaaaatatcagaaaatacagctgaagggacagcatttagactagaaagagcacaggatccagatggaggacttaacggtatccaaaactacacgatcagccccaactcttttttccatattaacattagtggcggtgatgaaggcatgatatatccagagctagtgttggacaaagcactggatcgggaggagcagggagagctcagcttaaccctcacagcgctggatggtgggtctccatccaggtctgggacctctactgtacgcatcgttgtcttggacgtcaatgacaatgccccacagtttgcccaggctctgtatgagacccaggctccagaaaacagccccattgggttccttattgttaaggtatgggcagaagatgtagactctggagtcaacgcggaagtatcctattcattttttgatgcctcagaaaatattcgaacaacctttcaaatcaatcctttttctggggaaatctttctcagagaattgcttgattatgagttagtaaattcttacaaaataaatatacaggcaatggacggtggaggcctttctgcaagatgtagggttttagtggaagtattggacaccaatgacaatccccctgaactgatcgtatcatcattttccaactctgttgctgagaattctcctgagacgccgctggctgtttttaagattaatgacagagactctggagaaaatggaaagatggtttgctacattcaagagaatctgccattcctactaaaaccttctgtggagaatttttacatcctaattacagaaggcgcgctggacagagagatcagagccgagtacaacatcactatcaccgtcactgacttggggacacccaggctgaaaaccgagcacaacataacggtcctggtctccgacgtcaatgacaacgcccccgccttcacccaaacctcctacaccctgttcgtccgcgagaacaacagccccgccctgcacatcggcagcgtcagcgccacagacagagactcgggcaccaacgcccaggtcacctactcgctgctgccgccccaagacccgcacctgcccctcgcctccctggtctccatcaacgcggacaacggccacctgttcgccctcaggtcgctggactacgaggccctgcaggctttcgagttccgcgtgggcgccacagaccgcggctcccccgcgctgagcagagaggcgctggtgcgcgtgctggtgctggacgccaacgacaactcgcccttcgtgctgtacccgctgcagaacggctccgcgccctgcaccgagctggtgccccgggcggccgagccgggctacctggtgaccaaggtggtggcggtggacggcgactcgggccagaacgcctggctgtcgtaccagctgctcaaggccacggagcccgggctgttcggtgtgtgggcgcacaatggggaggtgcgcaccgccaggctgctgagcgagcgcgacgcagccaagcacaggctcgtggtgcttgtcaaggacaatggcgagcctcctcgctcggccaccgccacgctgcacttgctcctggtggacggcttctcccagccctacctgcctctcccggaggcggccccggcccaggcccaggccgaggccgacttgctcaccgtctacctggtggtggcgttggcctcggtgtcttcgctcttcctcctctcggtgctcctgttcgtggcggtgcggctgtgcaggaggagcagggcggcctcggtgggtcgctgctcggtgcccgagggtccttttccagggcatctggtggacgtgaggggcgctgagaccctgtcccagagctaccagtatgaggtgtgtctgacgggaggccccgggaccagtgagttcaagttcttgaaaccagttatttcggatattcaggcacagggccctgggaggaagggtgaagaaaattccaccttccgaaatagctttggatttaatattcagtaaagtctgtttttagtttcatatacttttggtgtgttacatagccatgtttctattagtttacttttaaatctcaaatttaagttattatgcaacttcaagcattattttcaagtagtatacccctgtggttttacaatgtttcatcatttttttgcattaataacaactgggtttaatttaatgagtatttttttctaaatgatagtgttaaggttttaattctttccaactgcccaaggaattaattactattatatctcattacagaaatctgaggttttgattcatttcagagcttgcatctcatgattctaatcacttctgtctatagtgtacttgctctatttaagaaggcatatctacatttccaaactcattctaacattctatatattcgtgtttgaaaaccatgtcatttatttctacatcatgtatttaaaaagaaatatttctctactactatgctcatgacaaaatgaaacaaagcatattgtgagcaatactgaacatcaataatacccttagtttatatacttattattttatctttaagcatgctacttttacttggccaatattttcttatgttaacttttgctgatgtataaaacagactatgccttataattgaaataaaattataatctgcctgaaaatgaataaaaataaaacattttgaaatgtgaaaaaaaaaaaaaaaaaaaaaa

SEQ ID NO: 73 - protein, 932 aa, Homo sapiens
MTNCLSFRNGRGLALLCALLGTLCETGSGQIRYSVSEELDKGSFVGNIANDLGLEPRELAERGVRIVSRGRTQLFSLNPQSGSLVTAERIDREELCAQIPLCLVKINILVEDKLKIFEVEIEIKDINDNAPNFPTEELEIKIGELTVPGTRFPIKTAFDPDVGINSLQNYKLSPNDYFSLAVNSVSEGAKYPELVLERALDREKKEIHQLVLVASDGGDPVHSGNLHIQVIVLDANDNPPMFTQPEYRVSVWENVPVGTRLLTVNATDPDEGFNAQVSYILDKMPGKIAEIFHLNSVSGEVSILKSLDYEDAMFYEIKIEAQDGPGLLSRAKILVTVLDVNDNAPEITITSLTSSVPEEGTVGREIALIDVHDRDSGQNGQVEVFVLGNLPFKLEKSIDQYYRLVTATSLDREQISEYNISLRASDGGSPPLSTETHITLHVIDINDNPPTFPHLSYSAYIPENNPRGASIFSVTAQDPDSNNNARITYALTEDTLQGAPLSSFVSINSNTGVLYALRSFDYEQFRDLKLLVTASDSGNPPLSSNVSLNLFVLDQNDNAPEILYPALPTDGSTGVELAPRSAEPGYLVTKVVAVDRDSGQNAWLSYRLLKASEPGLFSVGLHTGEVRTARALLDRDALKQSLVVAVQDHGQPPLSATVTLTVAVADRIPDILADLGSLEPSAKPNDSDLTLYLVVAVAAVSCVFLAFVIVLLALRLRRWHKSRLLQASGGGLASTPGSHFVGADGVRAFLQTYSHEVSLTADSRKSHLIFPQPNYADTLISQESCEKSEPLLITQDLLEMKGDSNLLQQAPPNTDWRFSQAQRPGTSGSQNGDDTGTWPNNQFDTEMLQAMILASASEAADGSSTLGGGAGTMGLSARYGPQFTLQHVPDYRQNVYIPGSNATLTNAAGKRDGKAPAGGNGNKKKSGKKEKK

SEQ ID NO: 74 - DNA, 4605 bp, Homo sapiens
atgaccaattgcctgagtttccgaaatggcagaggactggccctgctgtgcgcgctcctggggacgctgtgcgaaacaggatccggtcagatccgctactcggtgtctgaggagctagataaaggttccttcgtgggcaacatcgctaacgacctggggctagagccccgggagctggcggagcgcggagtccgcatcgtctccagaggtaggacgcagcttttctctctgaatccgcaaagcggcagcttggtcaccgcggagaggatagaccgggaggagctctgcgctcagatcccgctgtgtctggtaaaaattaacattctggttgaggataaattgaaaatttttgaagtagaaatagaaattaaagatattaatgataatgctcctaatttcccaacagaggaattggaaataaaaattggtgaactaacggttcctggaacccgatttccaattaaaactgcttttgacccagatgtaggcattaactccctgcagaactacaagcttagccccaatgactacttctctctggctgtgaatagcgtctctgagggggccaagtatccagagctggtgctggagcgggccctggaccgtgagaaaaaagaaattcaccagcttgtcctggttgcctctgatggtggcgaccctgtccactctggcaacttgcacatccaagtgatagtcctggatgcaaatgacaacccaccaatgtttactcagcctgagtaccgtgtgagtgtttgggagaacgtgcctgtgggtacccggctgctcacggtgaatgccactgaccctgacgagggattcaatgctcaagtgtcttatattctagataaaatgcctgggaaaatcgctgagattttccatcttaactcagtgagtggagaagtatcaatattaaaaagtctagattatgaggatgccatgttctatgaaattaaaattgaagcacaggatggaccaggtcttctttcaagagccaagattctagtcacggttctggatgtgaatgacaatgctccagaaattacaatcacgtctctcacaagctcagtcccagaagagggcaccgttggaagagaaattgctcttatcgacgtgcatgaccgagattctgggcagaatgggcaggttgaagtttttgtcctgggaaatctgccatttaagttagaaaaatcaatagatcaatattaccgcttagtgacggccacatccctggaccgcgaacaaatatcagaatataacattagtctgagagcctcagatgggggaagcccgccactgtccacagaaactcacatcaccctgcatgtgattgacatcaatgacaacccacccaccttccctcatttatcctactccgcctacattccagaaaacaaccccagaggagcctccatcttctcagtgacagcccaggacccagatagcaacaacaacgcccgcatcacttatgcattgaccgaggacactctccagggggcgcccctgtcctccttcgtctctatcaactccaacactggcgtcctatacgcgctgagatccttcgactacgagcaatttagagacttaaagctactggtgacagccagcgacagcgggaaccctccactcagcagcaacgtgtcgctgaacctgttcgtgctggaccagaacgacaacgcgcccgagatcctgtaccccgccctccccacagacggttccactggcgtggagctggcgcctcgctccgcagagcccggctacctggtgaccaaggtggtggcggtggacagagactcgggccagaacgcctggctgtcctaccgcctgctcaaggccagcgagccgggactcttctcggtgggtctgcacacgggcgaggtgcgcacggcgcgagccctgctggacagagacgcgctcaagcagagcctcgtggtggccgtccaggaccacggccagccccctctctccgccactgtcacgctcaccgtggccgtggccgacaggatccccgacatcctggccgacctgggcagcctcgagccctccgccaaacccaacgattcggacctcactctgtacctggtggtggcggtggccgcggtctcctgcgtcttcctggccttcgtcatcgtgctgctggcgctcaggctgcggcgctggcacaagtcacgcctgctgcaggcttcgggaggcggcttggcgagtacgcccggctcgcactttgtgggcgcggacggggttcgggctttcctgcagacctattcccacgaggtctccctcactgcggactcgcggaagagccacctgattttcccccagcccaactatgcggacacgctcatcagccaggagagctgtgagaaaagcgagcctcttctgataactcaggatttacttgaaatgaaaggagattccaacctacttcagcaagccccgcccaacacggactggcgtttctctcaggcccagagacccggcaccagcggctcccaaaatggcgatgacaccggcacctggcccaacaaccagtttgacacagagatgctgcaagccatgatcttggcgtccgccagtgaagctgctgatgggagctccaccctgggagggggtgccggcaccatgggattgagcgcccgctacggaccccagttcaccctgcagcacgtgcccgactaccgccagaatgtctacatcccaggcagcaatgccacactgaccaacgcagctggcaagcgggatggcaaggccccagcaggtggcaatggcaacaagaagaagtcgggcaagaaggagaagaagtaacatggaggccaggccaagagccacagggcggcctctccccaaccagcccagcttctccttacctgcacccaggcctcagagtttcagggctaacccccagaatactggtaggggccaaggccatgctccccttgggaaacagaaacaagtgcccagtcagcacctaccccttcccccccagggggttgaatatgcaaaagcagttccgctgggaacccccatccaatcaactgctgtacccatgggggtagtggggttactgtagacaccaagaaccatttgccacaccccgtttagttacagctgaactcctccatcttccaaatcaatcaggcccatccatcccatgcctccctcctccccaccccactccaacagttcctctttcccgagtaaggtggttggggtgttgaagtaccaagtaacctacaagcctcctagttctgaaaagttggaagggcatcatgacctcttggcctctcctttgattctcaatcttcccccaaagcatggtttggtgccagccccttcacctccttccagagcccaagatcaatgctcaagttttggaggacatgatcaccatccccatggtactgatgcttgctggatttagggagggcattttgctaccaagcctcttcccaacgccctggggaccagtcttctgttttgtttttcattgtttgacgtttccactgcatgccttgacttcccccacctcctcctcaaacaagagactccactgcatgttccaagacagtatggggtggtaagataaggaagggaagtgtgtggatgtggatggtgggggcatggacaaagcttgacacatcaagttatcaaggccttggaggaggctctgtatgtcctcaggggactgacaacatcctccagattccagccataaaccaataactaggctggacccttcccactacataatagggctcagcccaggcagccagctttgggctgagctaacaggaccaatggattaaactggcatttcagtccaaggaagctcgaagcaggtttaggaccaggtccccttgagaggtcagaggggcctctgtgggtgctgggtactccagaggtgccactggtggaagggtcagcggagccccagcaggaagggtgggccagccaggccattcttagtccctgggttggggaggcagggagctagggcagggaccaaatgaacagaaagtctcagcccaggatggggcttcttcaacagggcccctgccctcctgaagcctcagtccttcaccttgccaggtgccgtttctcttccgtgaaggccactgcccaggtccccagtgcgccccctagtggccatagcctggttaaagttccccagtgcctccttgtgcatagaccttcttctcccacccccttctgcccctgggtccccggccatccagcggggctgccagagaaccccagacctgcccttacagtagtgtagcgccccctccctctttcggctggtgtagaatagccagtagtgtagtgcggtgtgcttttacgtgatggcgggtgggcagcgggcggcgggctccgcgcagccgtctgtccttgatctgcccgcggcggcccgtgttgtgttttgtgctgtgtccacgcgctaaggcgaccccctcccccgtactgacttctcctataagcgcttctcttcgcatagtcacgtagctcccaccccaccctcttcctgtgtctcacgcaagttttatactctaatatttatatggctttttttcttcgacaaaaaaataataaaacgtttcttctgaaaagctg

SEQ ID NO: 75 - protein, 810 aa, Homo sapiens [sequence omitted]

SEQ ID NO: 76 - DNA, 4590 bp, Homo sapiens
atgcagagagccagagaagccgaaatgatgaaaagtcaggtactgtttcccttcctgctgtctttgttctgcggggccatctcccagcagatccgatacacgattccagaggagctagccaacggctcacgggtggggaaacttgccaaggatctggggctcagtgtccgggagttgccaactcgaaaactgcgggttagtgcagaggattatttcaacgttagtttggagagcggggatttgttagtgaacggtaggatagatcgagagaagatttgcggaaggaaacttgagtgtgcactagaattcgaaacggtcgctgaaaacccaatgaatgttttccacgtggttgttgtaatccaagatattaatgacaatgcaccacgtttcgttgcaaaaggcattgacttagaaatttgtgagtcagccttacccggggtaaaattctctctggattctgctcaagatgcagatgtggaaggcaattcactgaagttatacaccatcaaccccaatcaatacttctctctgtcaacgaaggaaagtcctgatggaagtaaatatccggtattactgctggaaaaacctctagacagggaacatcagagctctcatcgcttaatcctgactgccatggatggcggggacccgcctctaagcggcaccacccatatctggatccgagttacggatgccaatgataatgctcccgtgtttagccaggaggtatacagggttagcctccaagaaaacgtaccgtggggaacctccgtgctgcgggtgatggccacagaccaggatgagggcattaatgcagagatcacctatgccttcctcaattccccaataagtaccagcctcttcaatctcaatccaaatactggcgacatcacaaccaatggcacattggattttgaagagacaagtagatatgtgttgagtgtggaagctaaggatggaggagtacacacagctcactgtaatgttcaaatagaaattgttgacgagaatgacaatgccccagaggtgacattcatgtccttctctaaccagattccagaggattcagaccttggaactgtaatagccctcataaaagtgcgagacaaggattctgggcaaaatggcatggtgacatgctatactcaggaagaagttcctttcaaattagaatccacctcgaagaattattacaagctggtgattgctggagccctaaaccgggagcagacagcagactacaacgtcacaatcatagccaccgacaagggcaaaccagccctttcctccaggacaagcatcaccctgcacatctccgacatcaacgacaatgcacctgttttccatcaggcctcctatgtggtccacgtgtctgagaacaacccacctggcgcctccattgcacaagtaagcgcctccgacccggatttgggacccaacggcagagtctcctactctattctggccagtgacctggagccgcgggagctgttgtcctacgtgtccgtgagcccgcagagcggggtggtgttcgcgcagcgcgccttcgaccacgagcagctgcgcgccttcgagctcacactgcaggccagggaccagggctcccccgcgctcagcgccaacgtgagcctgcgcgtgttggtgggcgacctcaatgacaatgcgccacgggtgctgtaccccgcgctggggcctgatggctccgccctcttcgatatggtgccacgcgccgcagagcccggctacctggtgaccaaggtggtggcggtggacgcagactcaggacacaacgcttggctgtcctaccacgtgctgcaggccagcgagcccgggctcttcagcctggggttgcgcacgggtgaggtgcgcacagcgcgtgccttgggcgacagggacgcggcccgccagcgcctgctggtcgctgtgcgtgatggaggacagccgccactctccgccaccgccacgctgcacctaatcttcgcggatagcctgcaagaggtattgccagacctcagcgaccgccctgagccctctgacccccagacggaactgcagttttacctggttgtggccttggccttgatctcagtgctctttctcctcgcggtgattctagcgatcgccctgcgcctgcgacgttcctccagcctcgacactgagggctgctttcaaaccggtctctgctccaagtctgggcccggggttcctcccaaccacagcgaggggactttgccctattcctacaatctatgtattgcctctcattctgcaaagacagagtttaattctctcaacctgacaccggaaatggctccccctcaggatctgctgtgtgatgatccttctatggttgtatgtgccagtaatgaagatcacaaaatcgcttatgacccttctttgtcttcgcaccaagccccgcccaacacggactggcgtttctctcaggcccagagacccggcaccagcggctcccaaaatggcgatgacaccggcacctggcccaacaaccagtttgacacagagatgctgcaagccatgatcttggcgtccgccagtgaagctgctgatgggagctccaccctgggagggggtgccggcaccatgggattgagcgcccgctacggaccccagttcaccctgcagcacgtgcccgactaccgccagaatgtctacatcccaggcagcaatgccacactgaccaacgcagctggcaagcgggatggcaaggccccagcaggtggcaatggcaacaagaagaagtcgggcaagaaggagaagaagtaacatggaggccaggccaagagccacagggcggcctctccccaaccagcccagcttctccttacctgcacccaggcctcagagtttcagggctaacccccagaatactggtaggggccaaggccatgctccccttgggaaacagaaacaagtgcccagtcagcacctaccccttcccccccagggggttgaatatgcaaaagcagttccgctgggaacccccatccaatcaactgctgtacccatgggggtagtggggttactgtagacaccaagaaccatttgccacaccccgtttagttacagctgaactcctccatcttccaaatcaatcaggcccatccatcccatgcctccctcctccccaccccactccaacagttcctctttcccgagtaaggtggttggggtgttgaagtaccaagtaacctacaagcctcctagttctgaaaagttggaagggcatcatgacctcttggcctctcctttgattctcaatcttcccccaaagcatggtttggtgccagccccttcacctccttccagagcccaagatcaatgctcaagttttggaggacatgatcaccatccccatggtactgatgcttgctggatttagggagggcattttgctaccaagcctcttcccaacgccctggggaccagtcttctgttttgtttttcattgtttgacgtttccactgcatgccttgacttcccccacctcctcctcaaacaagagactccactgcatgttccaagacagtatggggtggtaagataaggaagggaagtgtgtggatgtggatggtgggggcatggacaaagcttgacacatcaagttatcaaggccttggaggaggctctgtatgtcctcaggggactgacaacatcctccagattccagccataaaccaataactaggctggacccttcccactacataatagggctcagcccaggcagccagctttgggctgagctaacaggaccaatggattaaactggcatttcagtccaaggaagctcgaagcaggtttaggaccaggtccccttgagaggtcagaggggcctctgtgggtgctgggtactccagaggtgccactggtggaagggtcagcggagccccagcaggaagggtgggccagccaggccattcttagtccctgggttggggaggcagggagctagggcagggaccaaatgaacagaaagtctcagcccaggatggggcttcttcaacagggcccctgccctcctgaagcctcagtccttcaccttgccaggtgccgtttctcttccgtgaaggccactgcccaggtccccagtgcgccccctagtggccatagcctggttaaagttccccagtgcctccttgtgcatagaccttcttctcccacccccttctgcccctgggtccccggccatccagcggggctgccagagaaccccagacctgcccttacagtagtgtagcgccccctccctctttcggctggtgtagaatagccagtagtgtagtgcggtgtgcttttacgtgatggcgggtgggcagcgggcggcgggctccgcgcagccgtctgtccttgatctgcccgcggcggcccgtgttgtgttttgtgctgtgtccacgcgctaaggcgaccccctcccccgtactgacttctcctataagcgcttctcttcgcatagtcacgtagctcccaccccaccctcttcctgtgtctcacgcaagttttatactctaatatttatatggctttttttcttcgacaaaaaaataataaaacgtttcttctgaaaagctg

SEQ ID NO: 77 - protein, 811 aa, Homo sapiens
MKASSGRCGLVRWLQVLLPFLLSLFPGALPVQIRYSIPEELAKNSVVGNLAKDLGLSVRDLPARKLRVSAEKEYFTVNPESGDLLVSDRIDREQICGKQPLCVLDFDTVAENPLNIFYIAVIVQDINDNTPLFKQTKINLKIGESTKPGTTFPLDPALDSDVGPNSLQRYHLNDNEYFDLAEKQTPDGRKYPELILKHSLDREEHSLHQLVLTAVDGGDPPQSGTTQIRIKVTDANDNPPVFSQDVYRVTLREDVPPGFFVLQVTATDRDEGINAEITYSFHNVDEQVKHFFNLNEKTGEITTKDDLDFEIASSYTLSIEAKDPGDLAAHCSIQVEILDDNDCAPEVIVTSVSTPLPEDSPPGTVIALIKTRDRDSGENGEVYCQVLGNAKFILKSSSKNYYKLVTDGALDREEIPEYNLTITATDGGKPPLSSSIIVTLHISDVNDNAPVFQQTSYMVHVAENNPPGASIAQISASDPDLGPSGQVSYSIVASDLKPREILSYVSVSAQSGVVFAQRAFDHEQLRAFELTLQARDQGSPALSANVSLRVLVGDLNDNAPRVLYPALGPDGSALFDMVPRAAEPGYLVTKVVAVDADSGHNAWLSYHVLQASEPGLFSLGLRTGEVRTARALGDRDAARQRLLVAVRDGGQPPLSATATLHLIFADSLQEVLPDLSDRREPSDPQAKLQFYLVVALALISVLFFLAVILAISLRLRLSSRSDAWDCFQPGLSSKPGPGVLPNYSEGTLPYSYNLCVASQSAKTEFNFLNITPELVPAQDLVCDNASWEQNTNHGAAGVPFASDTILKVSFN

SEQ ID NO: 78 - DNA, 4602 bp, Homo sapiens
atgaaagcgagctcagggaggtgcgggctggtgcggtggctgcaggtactgttgcccttcctgttgtctttgttccccggggctctcccagtccagatccgctattcaattccagaggagctggccaaaaactcggtcgtaggaaacctcgccaaggatctggggctcagcgtccgggacttgccagcccggaagctgcgggttagcgcggagaaggaatatttcacagtaaacccagaaagcggagacttacttgtgagtgacagaatagaccgagaacagatatgcgggaagcagcctctgtgtgttctggatttcgatactgtcgctgaaaatccactaaatattttctacatagcagtaattgtgcaggatataaatgataataccccgctattcaaacagactaagattaatttaaaaattggcgaatccactaagccaggtacaacatttccacttgacccagccctggattcagatgttggtcctaactcactacaaagataccaccttaatgacaacgagtactttgatctcgctgagaaacagactccagatggtcgtaaatatcctgagttgattctaaaacactctctggacagagaagagcacagtttacatcaattggtcctcacagctgtggatggcggagacccacctcaaagtggcacgacccaaatccgaatcaaagtcacggatgccaacgataaccctccagtgttcagccaggacgtgtacagggtcaccctgagggaggacgtgccgccgggcttctttgtgcttcaagtgacagccaccgaccgggatgaaggcataaacgcagagatcacctactcctttcataatgtggacgaacaagtgaaacactttttcaacttaaatgaaaaaacaggagaaatcacgacaaaggatgatttggattttgagattgcaagtagttacactctgagtatcgaagcaaaagatcctggagatctagcagcccactgcagtatccaagttgaaattcttgatgacaacgattgtgcacctgaagttattgtgacttcagtatctactcccctaccggaggattcgccaccaggaacagtgatcgccttgataaaaacgagagacagagactctggagaaaatggagaagtttactgccaagtgttgggaaatgccaagtttattttgaaatcttcctcaaagaactattacaaactagtgacagacggcgctctggaccgggaggagatcccagaatacaatctcaccatcacagccaccgacgggggcaagccgcccctctcctccagcataattgtcaccctgcacatctccgacgtcaacgataatgccccagttttccaacagacttcctacatggttcacgtggcagagaacaatcctcctggcgcctctatcgctcaaatcagtgcctctgaccctgacttgggccccagtggccaagtttcctactccatcgtagcgagcgacctgaagccgcgggagattttatcctacgtgtccgtgagcgcgcagagcggggtggtgttcgcgcagcgcgccttcgatcatgagcagctgcgcgccttcgagctcacactgcaggcccgcgaccagggctcgcccgcgctcagcgccaacgtgagcctgcgcgtgttagtgggcgacctcaatgacaatgcgccacgggtgctgtaccccgcgctggggcctgatggctccgccctcttcgatatggtgccacgcgccgcagagcccggctacctggtgaccaaggtggtggcggtggacgcagactcaggacacaacgcttggctgtcctaccacgtgctgcaggccagcgagcccgggctcttcagcctggggttgcgcacgggtgaggtgcgcacagcgcgtgccttgggcgacagggacgcggcccgccagcgcctgctggtcgctgtgcgtgatggaggacagccgccactctccgctacggccacgctgcacctaatcttcgcggatagcctgcaagaggtattgccagacctcagcgaccgccgggagccctctgacccccaggcaaaactgcagttttacctggttgtggccttggccttgatctcagtgctcttcttcctcgcggtgattctggcaatctccctgcgcctgcgactctcttccaggtcagatgcttgggactgttttcagcctggtctcagctccaagcctggacctggggttctccccaattacagtgagggtacattgccctattcctacaacctgtgtgttgcctcacaatcagccaagacagagttcaattttctgaacataaccccggaattggttcccgcgcaagatctcgtctgtgacaatgcctcttgggaacaaaatacaaatcatggagccgctggggtcccttttgcctcagatactattttgaagcaagccccgcccaacacggactggcgtttctctcaggcccagagacccggcaccagcggctcccaaaatggcgatgacaccggcacctggcccaacaaccagtttgacacagagatgctgcaagccatgatcttggcgtccgccagtgaagctgctgatgggagctccaccctgggagggggtgccggcaccatgggattgagcgcccgctacggaccccagttcaccctgcagcacgtgcccgactaccgccagaatgtctacatcccaggcagcaatgccacactgaccaacgcagctggcaagcgggatggcaaggccccagcaggtggcaatggcaacaagaagaagtcgggcaagaaggagaagaagtaacatggaggccaggccaagagccacagggcggcctctccccaaccagcccagcttctccttacctgcacccaggcctcagagtttcagggctaacccccagaatactggtaggggccaaggccatgctccccttgggaaacagaaacaagtgcccagtcagcacctaccccttcccccccagggggttgaatatgcaaaagcagttccgctgggaacccccatccaatcaactgctgtacccatgggggtagtggggttactgtagacaccaagaaccatttgccacaccccgtttagttacagctgaactcctccatcttccaaatcaatcaggcccatccatcccatgcctccctcctccccaccccactccaacagttcctctttcccgagtaaggtggttggggtgttgaagtaccaagtaacctacaagcctcctagttctgaaaagttggaagggcatcatgacctcttggcctctcctttgattctcaatcttcccccaaagcatggtttggtgccagccccttcacctccttccagagcccaagatcaatgctcaagttttggaggacatgatcaccatccccatggtactgatgcttgctggatttagggagggcattttgctaccaagcctcttcccaacgccctggggaccagtcttctgttttgtttttcattgtttgacgtttccactgcatgccttgacttcccccacctcctcctcaaacaagagactccactgcatgttccaagacagtatggggtggtaagataaggaagggaagtgtgtggatgtggatggtgggggcatggacaaagcttgacacatcaagttatcaaggccttggaggaggctctgtatgtcctcaggggactgacaacatcctccagattccagccataaaccaataactaggctggacccttcccactacataatagggctcagcccaggcagccagctttgggctgagctaacaggaccaatggattaaactggcatttcagtccaaggaagctcgaagcaggtttaggaccaggtccccttgagaggtcagaggggcctctgtgggtgctgggtactccagaggtgccactggtggaagggtcagcggagccccagcaggaagggtgggccagccaggccattcttagtccctgggttggggaggcagggagctagggcagggaccaaatgaacagaaagtctcagcccaggatggggcttcttcaacagggcccctgccctcctgaagcctcagtccttcaccttgccaggtgccgtttctcttccgtgaaggccactgcccaggtccccagtgcgccccctagtggccatagcctggttaaagttccccagtgcctccttgtgcatagaccttcttctcccacccccttctgcccctgggtccccggccatccagcggggctgccagagaaccccagacctgcccttacagtagtgtagcgccccctccctctttcggctggtgtagaatagccagtagtgtagtgcggtgtgcttttacgtgatggcgggtgggcagcgggcggcgggctccgcgcagccgtctgtccttgatctgcccgcggcggcccgtgttgtgttttgtgctgtgtccacgcgctaaggcgaccccctcccccgtactgacttctcctataagcgcttctcttcgcatagtcacgtagctcccaccccaccctcttcctgtgtctcacgcaagttttatactctaatatttatatggctttttttcttcgacaaaaaaataataaaacgtttcttctgaaaagctg

SEQ ID NO: 79 - protein, 347 aa, Homo sapiens
MADLGATKDRIISEINRLQQEATEHATESEERFRGLEEGQAQAGQCPSLEGRLGRLEGVCERLDTVAGGLQGLREGLSRHVAGLWAGLRETNTTSQMQAALLEKLVGGQAGLGRRLGALNSSLQLLEDRLHQLSLKDLTGEGTKGPAGEAGPPGPPGLQGPPGPAGPPGSPGKDGQEGPIGPPGPQGEQGVEGAPAAPVPQVAFSAALSLPRSEPGTVPFDRVLLNDGGYYDPETGVFTAPLAGRYLLSAVLTGHRHEKVEAVLSRSNQGVARVDSGGYEPEGLENKPVAESQPSPGTLGVFSLILPLQAGDTVCVDLVMGQLAHSEEPLTIFSGALLYGDPELEHA

SEQ ID NO: 80 - DNA, 3959 bp, Homo sapiens
gggaggggagccagcagggaggaggaggccagggcccgccccacagccactctcgcgcctccgaacagccacaggggcaaagccctgtcacccccaggatccggtcatcagggaaagaggacagggagaccagaagagggccagctgggacgagggggcggacgcccaggaggcaacttctgagacgcagctcctgagaggggcagggaccaggcgcgggaggccagagggggcacagagaacaaaccccctcagaagtgaagaggagagcggaaggaaccgagaggggacggacaggagctgaggaggaaagaggaggggagaggggtcaggccaggcagccaaggagaagacgtgtggccgggggctatcagaaggaaactgggacggacgggccgggctcgggctgtcctgtggagcagcagcatccccggggccggcagaggcgccagtggctgggcgggatgagtctctgagggccactgtggagcgccccgccatggccccccgcaccctctggagctgctacctctgctgcctgctgacggcagctgcaggggccgccagctaccctcctcgaggtttcagcctctacacaggttccagtggggccctcagccccggggggccccaggcccagattgccccccggccagccagccgccacaggaactggtgtgcctacgtggtgacccggacagtgagctgtgtccttgaggatggagtggagacatatgtcaagtaccagccttgtgcctggggccagccccagtgtccccaaagcatcatgtaccgccgcttcctccgccctcgctaccgtgtggcctacaagacagtgaccgacatggagtggaggtgctgtcagggttatgggggcgatgactgtgctgagagtcccgctccagcgctggggcctgcgtcttccacaccacggcccctggcccggcctgcccgccccaacctctctggctccagtgcaggcagccccctcagtggactggggggagaaggtcctggggagtcagagaaggtgcagcagctggaggaacaggtgcagagcctgaccaaggagctgcaaggcctgcggggcgtcctgcaaggactgagcgggcgcctggcagaggatgtgcagagggctgtggagacggccttcaacgggaggcagcagccagctgacgcggctgcccgccctggggtgcatgaaaccctcaatgagatccagcaccagctgcagctcctggacacccgcgtctccacccacgaccaggagctgggtcacctcaacaaccatcatggcggcagcagcagcagtgggggcagcagggccccagccccagcctcagcccctccgggccccagtgaggagctgctgcggcagctggagcagcggttgcaggagtcctgctccgtgtgcctggccgggctagatggcttccgccggcagcagcaggaggacagggagcggctgcgagcgatggagaagctgctggcctcggtggaggagcggcaacggcacctcgcagggctggcggtgggccgcaggccccctcaggaatgctgctctccagagctgggccggcgactggcagagctggagcgcaggctggatgtcgtggccggctcagtgacagtgctgagtgggcggcgaggcacagagctgggaggagccgcggggcagggaggccaccccccaggctacaccagcttggcctcccgcctgtctcgcctggaggaccgcttcaactccaccctgggcccttcggaggagcaggaggagagctggcctggggctcctggggggctgagccactggctgcctgctgcccggggccgactagagcagttgggggggctgctggccaatgtgagcggggagctgggggggcggttggatctgttggaggagcaggtggcaggggccatgcaggcatgcgggcagctctgctctggggcccctggggagcaggactctcaagtcagcgagatcctcagtgccttggagcgcagggtgctggacagtgaggggcagctgcggctggtgggctccggcctgcacacggtggaagcagcgggggaggcccggcaggccacgctggagggattacaagaggttgtgggccggctccaggatcgtgtggatgcccaggatgagacagctgcagagttcacactacggctgaatctcactgcggcccggctaggccaactggaggggctgctgcaggcccatggggatgagggctgtggggcctgtggcggagtccaagaggaactaggccgccttcgggatggtgtggagcgctgctcctgccccctgttgcctcctcggggtcctggggctggtccaggtgttgggggcccaagccgtgggcccctggacggcttcagcgtgtttgggggcagctcaggctcagccctgcaggccctgcaaggagagctctctgaggttattctcagcttcagctccctcaatgactcactgaatgagctccagaccactgtggagggccagggcgctgatctggctgacctgggggcaaccaaggaccgtatcatttctgagattaacaggctgcagcaggaggccacagagcatgctacagagagtgaagagcgcttccgaggcctagaggagggacaagcacaggccggccagtgccccagcttagaggggcgattgggccgtcttgagggtgtctgtgaacggttggacactgtggctgggggactgcagggcctgcgcgagggcctttccagacacgtggctgggctctgggctgggctccgggaaaccaacaccaccagccagatgcaggcagccctgctggagaagctggtcgggggacaggcgggcctgggcaggcggctgggtgcccttaacagctccctgcagctcctggaggaccgtctgcaccagctcagcctgaaggacctcactgggcctgcaggagaggctgggcccccagggcctcctgggctgcagggacccccaggccctgctggacctccaggatcaccaggcaaggacgggcaagagggccccatcgggccaccaggtcctcaaggtgaacagggagtggagggggcaccagcagcccctgtgccccaagtggcattttcagctgctctgagtttgccccggtctgaaccaggcacggtccccttcgacagagtcctgctcaatgatggaggctattatgatccagagacaggcgtgttcacagcgccactggctggacgctacttgctgagcgcggtgctgactgggcaccggcacgagaaagtggaggccgtgctgtcccgctccaaccagggcgtggcccgcgtagactccggtggctacgagcctgagggcctggagaataagccggtggccgagagccagcccagcccgggcaccctgggcgtcttcagcctcatcctgccgctgcaggccggggacacggtctgcgtcgacctggtcatggggcagctggcgcactcggaggagccgctcaccatcttcagcggggccctgctctatggggacccagagcttgaacacgcgtagactggggtcccgcccgacgtgtctacgtcggctgaagagacagcgggggcggcgggctcctggggtctcgcctgagacggggcacctagccctgggcgagcgccgcacccgggcccgcagcggcaccgcgcccagagcggcctctccccacgcccggggcgcgccggctcagggaggctcggggccgcccatgcagacttttggcctggcgcgatcccccaagaacccctccagggccggcctgcggaggagccgatcctcgcaccctccgctccctccactggccctccaggtcgattccctgggctccaggctcccccgcgcgggcgccgcccaccgccatactaaacgatcgaggaataaagacacttggtttttctaaaaaaaaaaaaaaaaaaaaaaaaaaaaa

SEQ ID NO: 81 - protein, 1299 aa, Homo sapiens
MSLQEMFRFPMGLLLGSVLLVASAPATLEPPGCSNKEQQVTVSHTYKIDVPKSALVQVDADPQPLSDDGASLLALGEAREEQNIIFRHNIRLQTPQKDCELAGSVQDLLARVKKLEEEMVEMKEQCSAQRCCQGVTDLSRHCSGHGTFSLETCSCHCEEGREGPACERLACPGACSGHGRCVDGRCLCHEPYVGADCGYPACPENCSGHGECVRGVCQCHEDFMSEDCSEKRCPGDCSGHGFCDTGECYCEEGFTGLDCAQVVTPQGLQLLKNTEDSLLVSWEPSSQVDHYLLSYYPLGKELSGKQIQVPKEQHSYEILGLLPGTKYIVTLRNVKNEVSSSPQHLLATTDLAVLGTAWVTDETENSLDVEWENPSTEVDYYKLRYGPMTGQEVAEVTVPKSSDPKSRYDITGLHPGTEYKITVVPMRGELEGKPILLNGRTEIDSPTNVVTDRVTEDTATVSWDPVQAVIDKYVVRYTSADGDTKEMAVHKDESSTVLTGLKPGEAYKVYVWAERGNQGSKKADTNALTEIDSPANLVTDRVTENTATISWDPVQATIDKYVVRYTSADDQETREVLVGKEQSSTVLTGLRPGVEYTVHVWAQKGDRESKKADTNAPTDIDSPKNLVTDRVTENMATVSWDPVQAAIDKYVVRYTSAGGETREVPVGKEQSSTVLTGLRPGMEYMVHVWAQKGDQESKKADTKAQTDIDSPQNLVTDRVTENMATVSWDPVRATIDRYVVRYTSAKDGETREVPVGKEQSSTVLTGLRPGVEYTVHVWAQKGAQESKKADTKAQTDIDSPQNLVTDWVTENTATVSWDPVQATIDRYVVHYTSANGETREVPVGKEQSSTVLTGLRPGMEYTVHVWAQKGNQESKKADTKAQTEIDGPKNLVTDWVTENMATVSWDPVQATIDKYMVRYTSADGETREVPVGKEHSSTVLTGLRPGMEYMVHVWAQKGAQESKKADTKAQTELDPPRNLRPSAVTQSGGILTWTPPSAQIHGYILTYQFPDGTVKEMQLGREDQRFALQGLEQGATYPVSLVAFKGGRRSRNVSTTLSTVGARFPHPSDCSQVQQNSNAASGLYTIYLHGDASRPLQVYCDMETDGGGWIVFQRRNTGQLDFFKRWRSYVEGFGDPMKEFWLGLDKLHNLTTGTPARYEVRVDLQTANESAYAIYDFFQVASSKERYKLTVGKYRGTAGDALTYHNGWKFTTFDRDNDIALSNCALTHHGGWWYKNCHLANPNGRYGETKHSEGVNWEPWKGHEFSIPYVELKIRPHGYSREPVLGRKKRTLRGRLRTF

SEQ ID NO: 82 - DNA, 5008 bp, Homo sapiens
aagtaccaaggtctgcggcaggaggagaccggctcacaggagcagcagcattggaagaggcacccagcagcctcccaggcatcctggagggtctgctccctgtctttccaaggatgagtctccaggagatgttccgcttccctatggggctcctgcttggctctgtgctcctggtggcttcggccccagccactctggagcctcccggctgcagcaacaaggagcaacaggtcactgtcagccacacctacaagatcgatgtgcccaagtctgccttggttcaggttgacgctgaccctcagcccctcagtgacgatggggcttcgctcttggccctgggggaggccagggaggaacagaacatcatcttcaggcacaacatccgccttcagacgccacagaaggactgcgagttggcaggcagtgtccaggacctcctggcccgggtgaagaagctggaggaagagatggtggagatgaaggaacagtgtagtgcccagcgctgctgccagggagtcactgatctaagccgccactgcagcggccacgggaccttctccctggagacctgcagctgccactgcgaagagggcagggagggccccgcctgcgagcggctggcctgccccggggcgtgcagcggccacgggcgttgcgtggacgggcgctgcctgtgccatgagccctacgtgggtgccgactgcggctacccggcctgccctgagaactgcagcggacacggcgagtgcgtgcgcggcgtgtgccagtgccacgaagacttcatgtcggaggactgcagcgagaagcgctgtcccggcgactgcagcggccacggcttctgtgacacgggcgagtgctactgcgaggagggcttcacaggcctggactgtgcccaggtggtcaccccacagggcctgcagctgctcaagaacacggaggattctctgctggtgagctgggagccctccagccaggtggatcactacctcctcagctactaccccctggggaaggagctctctgggaagcagatccaagtgcccaaggagcagcacagctatgagattcttggtttgctgcctggaaccaagtacatagtcaccctgcgtaacgtcaagaatgaagtttctagcagcccacagcatctacttgccaccacagaccttgctgtgcttggcactgcctgggtgacagatgagactgagaactcccttgacgtggagtgggaaaacccctcaactgaggtggactactacaagctgcgatatggccccatgacaggacaggaggtagctgaggtcactgtgcccaagagcagtgaccccaagagccgatatgacatcactggtctgcacccggggactgagtataagatcacggtggtgcccatgagaggagagctggagggcaagccgatcctcctgaatggcaggacagaaattgacagtccaaccaatgttgtcactgatcgagtgactgaagacacagcaactgtctcctgggacccagtgcaggctgtcatagacaagtatgtagtgcgctacacttctgctgatggggacaccaaggaaatggcagtgcacaaggatgagagcagcactgtcctgacgggcctgaagccaggagaggcatacaaggtctacgtgtgggctgaaaggggcaaccaggggagcaagaaagctgacaccaatgccctcacagaaattgacagcccagcaaacctggtgactgaccgggtgactgagaataccgccaccatctcctgggacccggtacaggccaccattgacaagtacgtggtgcgctacacctctgctgacgaccaagagaccagagaggttctggtggggaaggagcagagcagcactgtcctgacaggcctgaggccaggtgtggagtacacagtgcatgtctgggcccagaagggggaccgagagagcaagaaggctgacaccaacgccccgacagatattgacagccccaaaaacctggtgactgaccgggtgacagagaatatggccacggtctcctgggacccggtgcaggccgccattgacaagtacgtggtgcgctacacctctgctggtggagagaccagggaggttccggtggggaaggagcagagcagcacagtcctgacaggcctgagaccgggtatggagtacatggtgcacgtgtgggcccagaagggggaccaggagagcaagaaggccgacaccaaggcccagacagacattgacagcccccaaaacctggtgaccgaccgggtgacagagaatatggccactgtctcctgggacccggtgcgggccaccattgacaggtatgtggtgcgctacacctctgccaaggacggagagaccagggaggttccggtggggaaggagcagagtagcactgtcctgacgggcctgaggccgggtgtggagtacacggtgcacgtgtgggcccagaagggggcccaggagagcaagaaggctgacaccaaggcccagacagacattgacagcccccaaaacctggtcactgactgggtgacagagaatacagccactgtctcctgggacccggtgcaggccaccattgacaggtatgtggtgcactacacgtctgccaacggagagaccagggaggttccagtggggaaggagcagagcagcactgtcctgacgggcctgaggccgggcatggagtacacggtgcacgtgtgggcccagaaggggaaccaggagagcaagaaggctgacaccaaggcccagacagaaattgacggccccaaaaacctagtgactgactgggtgacggagaatatggccactgtctcctgggacccggttcaggccaccattgacaagtacatggtgcgctacacctctgctgacggagagaccagggaggttccggtggggaaggagcacagcagcactgtcctgacgggcctgagaccaggcatggagtacatggtgcacgtgtgggcccagaagggggcccaggagagcaagaaggctgacaccaaggcccagacagaactcgaccctcccagaaaccttcgtccatctgctgtaacgcagtctggtggcatattgacctggacgcccccctctgctcagatccacggctacattctgacttaccagttcccagatggcacagttaaggagatgcagctgggacgggaagaccagaggtttgcgttgcaaggccttgagcaaggcgccacctaccctgtctcccttgttgcctttaagggtggtcgccggagcagaaatgtatccaccaccctctccacagttggtgcccgtttcccacacccttcggactgcagtcaggttcagcagaacagcaatgccgccagtggtctgtacaccatctacctgcatggcgatgccagccggcccctgcaggtgtactgtgacatggaaacggacggaggtggctggattgtcttccagaggcggaacactgggcagctggatttcttcaagcgatggaggagctatgtggaaggctttggggaccccatgaaggagttctggcttggacttgacaagctacacaacctcaccaccggcactccagcgcggtatgaggtgagagtggatttacagactgccaatgaatctgcctatgctatatatgatttcttccaagtggcctccagcaaggagcggtataagctgacagttgggaaatacagaggcacggcaggggatgctcttacttaccacaatggatggaagtttacaacttttgacagagacaatgatatcgcactcagcaactgtgccctgacacatcatggtggctggtggtataagaactgccacttggccaaccctaatggcagatatggggagaccaagcacagtgagggggtgaactgggagccttggaaaggacatgaattctccattccttacgtggagttgaaaatccgccctcatggctacagcagggagcctgtcctgggcagaaagaagcggacgctgagaggaaggctgcgaacgttctgatggcccgtgtgagcagtcctcgcaggagacaccaccagctgtggcagcttggggcggggtgggtagtggtcactgcggtctgggagtgctcagatagcccgcagaacaaatcatgtcaccaagcttcaagccatggaggttccttccctctcacctgcatttttgcccgtctttatgagggtcttgaaaatcaaaatagtagttgcacagtatgtgtaggaaagacagtactggaacggcaaggtttctcagcttatcttcagcaacatatatactggattagggcaagagaaggaatcacccagcacttcaccagttggaaatctctggaaatttacatctatgtatttaaagttctgctaatgcaaatcttttctctggaaagaagcacagaggaggagttctgatgacccaggggttagggctgagacaaccggacgtttgtcacctcctttcccattgggtttttaggaaaacagtgtgaacctcccccttttaatttctggtgttatgaggaagaataaaggggataaaaggggctaagatggactcatgtttagctaagttctgacttgtatccagcatgctggagaccaaagctgccgccttactgctatttttaagtgccctcttttcagtcatttgcataattgcgtccatagagctgcatatgttgtgaataaattctcactcatttcaactttgaataatttgactgtcttgataattggttcctcccaaagactcttctgcaactcccattcatgcccaccaggcctcagactccctcttttccccgccctgcactattggagccctgggttttgtgggagtgctcagcaccgtgagtcttactgtttgatcggacagttagcaagatcagatcctttttgcttattttctatcactttggagggttttctgtagcaaaatcagtgaccaatgaagtaacttaaattcctattgaagaaaaaaaataataaaccacttgattt

SEQ ID NO: 83 - DNA, 110 bp, Homo sapiens
tcacctggccatgtgacttgtgggcttccctttgtcatccttcgcctagggctctgagcagggcagggacagcaaaggggtgctcagttgtcacttcccacagcacggag

SEQ ID NO: 84 - protein, 347 aa, Homo sapiens
MALLFSLILAICTRPGFLASPSGVRLVGGLHRCEGRVEVEQKGQWGTVCDDGWDIKDVAVLCRELGCGAASGTPSGILYEPPAEKEQKVLIQSVSCTGTEDTLAQCEQEEVYDCSHDEDAGASCENPESSFSPVPEGVRLADGPGHCKGRVEVKHQNQWYTVCQTGWSLRAAKVVCRQLGCGRAVLTQKRCNKHAYGRKPIWLSQMSCSGREATLQDCPSGPWGKNTCNHDEDTWVECEDPFDLRLVGGDNLCSGRLEVLHKGVWGSVCDDNWGEKEDQVVCKQLGCGKSLSPSFRDRKCYGPGVGRIWLDNVRCSGEEQSLEQCQHRFWGFHDCTHQEDVAVICSV

SEQ ID NO: 85 - DNA, 2248 bp, Homo sapiens
gatcatctgataatgctttgcctgcactcaggacctgtctttgtccctcctcttaacatacttgcagctaaaactaaatattgctgcttggggacctccttctagccttaaatttcagctcatcaccttcacctgccttggtcatggctctgctattctccttgatccttgccatttgcaccagacctggattcctagcgtctccatctggagtgcggctggtggggggcctccaccgctgtgaagggcgggtggaggtggaacagaaaggccagtggggcaccgtgtgtgatgacggctgggacattaaggacgtggctgtgttgtgccgggagctgggctgtggagctgccagcggaacccctagtggtattttgtatgagccaccagcagaaaaagagcaaaaggtcctcatccaatcagtcagttgcacaggaacagaagatacattggctcagtgtgagcaagaagaagtttatgattgttcacatgatgaagatgctggggcatcgtgtgagaacccagagagctctttctccccagtcccagagggtgtcaggctggctgacggccctgggcattgcaagggacgcgtggaagtgaagcaccagaaccagtggtataccgtgtgccagacaggctggagcctccgggccgcaaaggtggtgtgccggcagctgggatgtgggagggctgtactgactcaaaaacgctgcaacaagcatgcctatggccgaaaacccatctggctgagccagatgtcatgctcaggacgagaagcaacccttcaggattgcccttctgggccttgggggaagaacacctgcaaccatgatgaagacacgtgggtcgaatgtgaagatccctttgacttgagactagtaggaggagacaacctctgctctgggcgactggaggtgctgcacaagggcgtatggggctctgtctgtgatgacaactggggagaaaaggaggaccaggtggtatgcaagcaactgggctgtgggaagtccctctctccctccttcagagaccggaaatgctatggccctggggttggccgcatctggctggataatgttcgttgctcaggggaggagcagtccctggagcagtgccagcacagattttgggggtttcacgactgcacccaccaggaagatgtggctgtcatctgctcaggatagtatcctggtgttgcttgacctggcccccctggccccgcctgccctctgcttgttctcctgagccctgattatcctcatactcattctggggctcaggcttgagccactactccctcatcccctcaggagtctgaacactgggcttatgccttactctcagggacaagcagcccccattgctgcctgtagatgtgagctgttgagttccctcttgctggggaagatgagcttccatgtatcctgtgctcaaccctgaccctttgacactggttctggcctttcctgccttttctcaagctgcctggaatcctcaaacctgtcactttggtcagatgtgcagaccattactaaggtctatgtctgcaaacattactaatctaggtcctattactaatctatgtctgcaaacattaaaggaatgaaacaatgaaaggaacatttgaaagaaaatgtgggtagacaatttcttgcaacttgggggaaagtttagaattcttttgattggactactttttttttttttcctcaagcttcaggtgaccacaatagcaacacctccctattctgttatttcttagtgtaggtagacaattctttcaggagcagagcagcgtcctataatcctagaccttttcatgacgtgtaaaaaatgatgtttcatcctctgattgccccaataaaaatctttgttgtccatccctatacaacctgccaacatggttgacatttaatgagaggaatgtcaaaaatacattttactttattcaaagaaaaatatattggttactgggaaaaggtcaagaaagaggcagaaagagatcagggagggctaaagttgtgtcttatgccaagcgaaagtgaaaaatatcattttcactttatcaactgagactttggggcctgtaagcttgaggcaagacagaaataagagaatcaagacttgattgtaaaaattgacaactttagattctgaggctaggctgagtacttattatacggctacatttacacatttacacttatctaataaatcagatttcacagtctcaaaaaaaaaaaaa

SEQ ID NO: 86 - protein, 776 aa, Homo sapiens [sequence omitted]

SEQ ID NO: 87 - DNA, 4040 bp, Homo sapiens
tgcagagcacagagaaaggacatctgcgaggaaagttccctgatggctgtcaacaaagtgccacgtctctatggctgtgaacgctgagcacacgattttatcgcgcctatcatatcttggtgcataaacgcacctcacctcggtcaacccttgctccgtcttatgagacaggctttattatccgcattttatatgaggggaaactgacggtggagagagaattatcttgctcaaggcgacacagcagagcccacaggtggcagaatcccacccgagcccgcttcgacccgcggggtggaaaccacgggcgcccgcccggctgcgcttccagagctgaactgagaagcgagtcctctccgccctgcggccaccgcccagccccgacccccgccccggcccgatcctcactcgccgccagctccccgcgcccaccccggagttggtggcgcagaggcgggaggcggaggcgggagggcgggcgctggcaccgggaacgcccgagcgccggcagagagcgcggagagcgcgacacgtgcggcccagagcaccggggccacccggtccccgcaggcccgggaccgcgcccgctggcaggcgacacgtggaagaatacggagttctataccagagttgattgttgatggcacatacttttagaggatgctcattggcatttatgtttataatcacgtggctgttgattaaagcaaaaatagatgcgtgcaagagaggcgatgtgactgtgaagccttcccatgtaattttacttggatccactgtcaatattacatgctctttgaagcccagacaaggctgctttcactattccagacgtaacaagttaatcctgtacaagtttgacagaagaatcaattttcaccatggccactccctcaattctcaagtcacaggtcttccccttggtacaaccttgtttgtctgcaaactggcctgtatcaatagtgatgaaattcaaatatgtggagcagagatcttcgttggtgttgctccagaacagcctcaaaatttatcctgcatacagaagggagaacaggggactgtggcctgcacctgggaaagaggacgagacacccacttatacactgagtatactctacagctaagtggaccaaaaaatttaacctggcagaagcaatgtaaagacatttattgtgactatttggactttggaatcaacctcacccctgaatcacctgaatccaatttcacagccaaggttactgctgtcaatagtcttggaagctcctcttcacttccatccacattcacattcttggacatagtgaggcctcttcctccgtgggacattagaatcaaatttcaaaaggcttctgtgagcagatgtaccctttattggagagatgagggactggtactgcttaatcgactcagatatcggcccagtaacagcaggctctggaatatggttaatgttacaaaggccaaaggaagacatgatttgctggatctgaaaccatttacagaatatgaatttcagatttcctctaagctacatctttataagggaagttggagtgattggagtgaatcattgagagcacaaacaccagaagaagagcctactgggatgttagatgtctggtacatgaaacggcacattgactacagtagacaacagatttctcttttctggaagaatctgagtgtctcagaggcaagaggaaaaattctccactatcaggtgaccttgcaggagctgacaggagggaaagccatgacacagaacatcacaggacacacctcctggaccacagtcattcctagaaccggaaattgggctgtggctgtgtctgcagcaaattcaaaaggcagttctctgcccactcgtattaacataatgaacctgtgtgaggcagggttgctggctcctcgccaggtctctgcaaactcagagggcatggacaacattctggtgacttggcagcctcccaggaaagatccctctgctgttcaggagtacgtggtggaatggagagagctccatccagggggtgacacacaggtccctctaaactggctacggagtcgaccctacaatgtgtctgctctgatttcagagaacataaaatcctacatctgttatgaaatccgtgtgtatgcactctcaggggatcaaggaggatgcagctccatcctgggtaactctaagcacaaagcaccactgagtggcccccacattaatgccatcacagaggaaaaggggagcattttaatttcatggaacagcattccagtccaggagcaaatgggctgcctcctccattataggatatactggaaggaacgggactccaactcccagcctcagctctgtgaaattccctacagagtctcccaaaattcacatccaataaacagcctgcagccccgagtgacatatgtcctgtggatgacagctctgacagctgctggtgaaagttcccacggaaatgagagggaattttgtctgcaaggtaaagccaattggatggcgtttgtggcaccaagcatttgcattgctatcatcatggtgggcattttctcaacgcattacttccagcaaaaggtgtttgttctcctagcagccctcagacctcagtggtgtagcagagaaattccagatccagcaaatagcacttgcgctaagaaatatcccattgcagaggagaagacacagctgcccttggacaggctcctgatagactggcccacgcctgaagatcctgaaccgctggtcatcagtgaagtccttcatcaagtgaccccagttttcagacatcccccctgctccaactggccacaaagggaaaaaggaatccaaggtcatcaggcctctgagaaagacatgatgcacagtgcctcaagcccaccacctccaagagctctccaagctgagagcagacaactggtggatctgtacaaggtgctggagagcaggggctccgacccaaagcccgaaaacccagcctgtccctggacggtgctcccagcaggtgaccttcccacccatgatggctacttaccctccaacatagatgacctcccctcacatgaggcacctctcgctgactctctggaagaactggagcctcagcacatctccctttctgttttcccctcaagttctcttcacccactcaccttctcctgtggtgataagctgactctggatcagttaaagatgaggtgtgactccctcatgctctgagtggtgaggcttcaagccttaaagtcagtgtgccctcaaccagcacagcctgccccaattcccccagcccctgctccagcagctgtcatctctgggtgccaccatcggtctggctgcagctagaggacaggcaagccagctctgggggagtcttaggaactgggagttggtcttcactcagatgcctcatcttgcctttcccagggccttaaaattacatccttcactgtgtggacctagagactccaacttgaattcctagtaactttcttggtatgctggccagaaagggaaatgaggaggagagtagaaaccacagctcttagtagtaatggcatacagtctagaggaccattcatgcaatgactatttctaaagcacctgctacacagcaggctgtacacagcagatcagtactgttcaacagaacttcctgagatgatggaaatgttctacctctgcactcactgtccagtacattagacactaggcacattggctgttaatcacttggaatgtgtttagcttgactgaggaattaaattttgattgtaaatttaaatcgccacacatggctagtggctactgtattggagtgcacagctctagatggctcctagattattgagagccttcaaaacaaatcaacctagttctatagatgaagacataaaagacactggtaaacaccaaggtaaaagggcccccaaggtggtcatgactggtctcatttgcagaagtctaagaatgtacctttttctggccgggcgtggtagctcatgcctgtaatcccagcactttgggaggctga

SEQ ID NO: 88 - protein, 390 aa, Homo sapiens
MDFWLWPLYFLPVSGALRILPEVKVEGELGGSVTIKCPLPEMHVRIYLCREMAGSGTCGTVVSTTNFIKAEYKGRVTLKQYPRKNLFLVEVTQLTESDSGVYACGAGMNTDRGKTQKVTLNVHSEYEPSWEEQPMPETPKWFHLPYLFQMPAYASSSKFVTRVTTPAQRGKVPPVHHSSPTTQITHRPRVSRASSVAGDKPRTFLPSTTASKISALEGLLKPQTPSYNHHTRLHRQRALDYGSQSGREGQGFHILIPTILGLFLLALLGLVVKRAVERRKALSRRARRLAVRMRALESSQRPRGSPRPRSQNNIYSACPRRARGADAAGTGEAPVPGPGAPLPPAPLQVSESPWLHAPSLKTSCEYVSLYHQPAAMMEDSDSDDYINVPA

SEQ ID NO: 89 - DNA, 3109 bp, Homo sapiens
agcctgagaatagttagcaaacaagggaggttgtcatttcctcatcgtcaagctttgttcctcgtgggggctagaaatctctttccagttccagattgtgaagggttcctgagtaagcagcgtgtctccatccccctctctaggggctcttggatggaccttgcactctagaagggacaatggacttctggctttggccactttacttcctgccagtatcgggggccctgaggatcctcccagaagtaaaggtagagggggagctgggcggatcagttaccatcaagtgcccacttcctgaaatgcatgtgaggatatatctgtgccgggagatggctggatctggaacatgtggtaccgtggtatccaccaccaacttcatcaaggcagaatacaagggccgagttactctgaagcaatacccacgcaagaatctgttcctagtggaggtaacacagctgacagaaagtgacagcggagtctatgcctgcggagcgggcatgaacacagaccggggaaagacccagaaagtcaccctgaatgtccacagtgaatacgagccatcatgggaagagcagccaatgcctgagactccaaaatggtttcatctgccctatttgttccagatgcctgcatatgccagttcttccaaattcgtaaccagagttaccacaccagctcaaaggggcaaggtccctccagttcaccactcctcccccaccacccaaatcacccaccgccctcgagtgtccagagcatcttcagtagcaggtgacaagccccgaaccttcctgccatccactacagcctcaaaaatctcagctctggaggggctgctcaagccccagacgcccagctacaaccaccacaccaggctgcacaggcagagagcactggactatggctcacagtctgggagggaaggccaaggatttcacatcctgatcccgaccatcctgggccttttcctgctggcacttctggggctggtggtgaaaagggccgttgaaaggaggaaagccctctccaggcgggcccgccgactggccgtgaggatgcgcgccctggagagctcccagaggccccgcgggtcgccgcgaccgcgctcccaaaacaacatctacagcgcctgcccgcggcgcgctcgtggagcggacgctgcaggcacaggggaggcccccgttcccggccccggagcgccgttgccccccgccccgctgcaggtgtctgaatctccctggctccatgccccatctctgaagaccagctgtgaatacgtgagcctctaccaccagcctgccgccatgatggaggacagtgattcagatgactacatcaatgttcctgcctgacaactccccagctatcccccaaccccaggctcggactgtggtgccaaggagtctcatctatctgctgatgtccaatacctgcttcatgtgttctcagagccctcatcacttcccatgccccatctcgactcccatccccatctatctgtgccctgagcatggctctgcccccaggtcgtcttgcacaccttggcagccccctgtagttgacaggtaagctgtaggcatgtagagcaattgtcccaatgccacttgcttcctttccaagccgtcgaacagactgtgggatttgcagagtgtttcttccatgtctttgaccacagggttgttgctgcccaggctctagatcacatggcatcaggctggggcagaggcatagctattgtctcgggcatccttcccagggttgggtcttacacaaatagaaggctcttgctctgagttatgtgacatgcctcagccccatggactaagcaggggtctggtataaaaacactcctggaaacgcctttgccctgatccaaatgttagcacttgctagtgaacgtctacttatctcaagttctatgctaaaggcaatttatcttgatgtgatgataaaccaaacttattagcaagatatgcatatatatccataaattctctttactctgtctccatcacttgatgcacataagtgccctgacctcagcatctcccctctaaaaaaaaaaaaaaaaaagtatctctttatctttcttccatagcctgacactgatatttgtgcacttaccttaactttggtctattttattcatccaaaaccattacatttcttggttttcacaaatgttccccatttcttagccagttccagacaatgtatagcaagcaggggaaggaaagcagtcaggagttcctgggtggccacggctctgcaatagcacttatgtcatggaagtgatatcccacctcctacatatactctttgcctaggtttttggaacaaggttatagtcagacactgtatctttagattgatgtcgaccacaaagttcagccagagcttgaggctagatgcacagccttgctattgggaagaaggccttttctagctgtacaacacagtctcactgggcattcatccagaaatagagaagaaagtctgccagacttgagttatgttgtcttttattagcagggaatgtcatcacagattggatagtacatccaggtgcaatgtcaccatcagcaaggtcagcttgacactcaagtggaagattagggaagaatgactaggataaaaaaaaaaggagggcaccaagggaaagggatgatggggtgagctggcgagtgtgggtgggaaatgaaatgtttattgaggatctgctttgtgctgggcactttaatccacattttatcgtttacttttcaaacagatgcaccttacccccaccccaatgctctgtccctgcagatatcagaagacagtgtgattttcatgctctgaagttcagttttacatccaagcatccctctctgttttttaacaatccaaagacaggccaaaaaaagcaccacagtttattaagtacttactaagcacccatccactgccccacactgtggcaaggattgtgaggggtaaagaagcatggggcacaatattctgctgccttcatgtaacttacagtctcacaaataaatagaacttcagttgaaatactgacattaattaaatagagttgtaataaaaaaaaaaaaaaaaaaaaaaaaaa

SEQ ID NO: 90 - protein, 281 aa, Homo sapiens [sequence omitted]

SEQ ID NO: 91 - DNA, 1142 bp, Homo sapiens
tagaaggcagtcttgtgggtgcctcctcccccagccgcaactcaggtctgcagctgggtcctgcctccttccgagtgggccatggccggtacatggctgctacttctcctggcccttgggtgtccagccctacccacaggtgtgggcggcacaccctttccttctctggccccaccaatcatgctgctggtggatggaaagcagcagatggtggtggtctgcctggtccttgatgttgcaccccctggccttgacagccccatctggttctcagccggcaatggcagtgcactggatgccttcacctatggcccttccccagcaacggatggcacctggaccaacttggcccatctctccctgccttctgaggagctggcatcctgggagcctttggtctgccacactgggcctggggctgagggtcacagcaggagtacacagcccatgcatctgtcaggagaggcttctacagccaggacctgcccccaggagcctctcagggggggctgcgggctcctgcgggctcctgagcggttcctcctcgcagggacaccgggtggggcgctgtggctgggggtcctgcggctgctgctcttcaagctgctgctgtttgacctgctcctgacctgcagctgcctgtgcgaccccgcgggcccgctgccttcccccgcaaccaccacccgcctgcgagccctcggctcccatcgactgcacccggccacggagactgggggacgagaggccaccagctcacccagaccccagcctcgggaccgccgctggggtgacacccctccgggtcggaagcccgggagcccagtatggggggaagggtcttacctcagcagttaccccacttgcccagcacaggcctggtgctcaagatctgccctcagggctccttcctccagtcttggagcattttttgcaggtgacctgcctcctcctctgcaggctggagctgcctgagggcagggctctacctcccctgcgtcacactgtgtgaggctgtgtctctgccatccaaaagggggccccttgagaatggtgatccacccagttacaggggcatttagggagcagatgactgagaacattaaaaaagaacttaaatgacacagcaaaaaaaaaaaaaaaaa

SEQ ID NO: 92 - protein, 360 aa, Homo sapiens
MSFPCKFVASFLLIFNVSSKGAVSKEITNALETWGALGQDINLDIPSFQMSDDIDDIKWEKTSDKKKIAQFRKEKETFKEKDTYKLFKNGTLKIKHLKTDDQDIYKVSIYDTKGKNVLEKIFDLKIQERVSKPKISWTCINTTLTCEVMNGTDPELNLYQDGKHLKLSQRVITHKWTTSLSAKFKCTAGNKVSKESSVEPVSCPEKGLDIYLIIGICGGGSLLMVFVALLVFYITKRKKQRSRRNDEELETRAHRVATEERGRKPHQIPASTPQNPATSQHPPPPPGHRSQAPSHRPPPPGHRVQHQPQKRPPAPSGTQVHQQKGPPLPRPRVQPKPPMGQQKTHCPLPLIKKDRNCLFQ

SEQ ID NO: 93 - DNA, 1660 bp, Homo sapiens
agtctcacttcagttccttttgcatgaagagctcagaatcaaaagaggaaaccaacccctaagatgagctttccatgtaaatttgtagccagcttccttctgattttcaatgtttcttccaaaggtgcagtctccaaagagattacgaatgccttggaaacctggggtgccttgggtcaggacatcaacttggacattcctagttttcaaatgagtgatgatattgacgatataaaatgggaaaaaacttcagacaagaaaaagattgcacaattcagaaaagagaaagagactttcaaggaaaaagatacatataagctatttaaaaatggaactctgaaaattaagcatctgaagaccgatgatcaggatatctacaaggtatcaatatatgatacaaaaggaaaaaatgtgttggaaaaaatatttgatttgaagattcaagagagggtctcaaaaccaaagatctcctggacttgtatcaacacaaccctgacctgtgaggtaatgaatggaactgaccccgaattaaacctgtatcaagatgggaaacatctaaaactttctcagagggtcatcacacacaagtggaccaccagcctgagtgcaaaattcaagtgcacagcagggaacaaagtcagcaaggaatccagtgtcgagcctgtcagctgtccaggaggcagcatccttggccagagtaatgggctctctgcctggacccctcccagccatcccacttctcttccttttgcagagaaaggtctggacatctatctcatcattggcatatgtggaggaggcagcctcttgatggtctttgtggcactgctcgttttctatatcaccaaaaggaaaaaacagaggagtcggagaaatgatgaggagctggagacaagagcccacagagtagctactgaagaaaggggccggaagccccaccaaattccagcttcaacccctcagaatccagcaacttcccaacatcctcctccaccacctggtcatcgttcccaggcacctagtcatcgtcccccgcctcctggacaccgtgttcagcaccagcctcagaagaggcctcctgctccgtcgggcacacaagttcaccagcagaaaggcccgcccctccccagacctcgagttcagccaaaacctccccatggggcagcagaaaactcattgtccccttcctctaattaaaaaagatagaaactgtctttttcaataaaaagcactgtggatttctgccctcctgatgtgcatatccgtacttccatgaggtgttttctgtgtgcagaacattgtcacctcctgaggctgtgggccacagccacctctgcatcttcgaactcagccatgtggtcaacatctggagtttttggtctcctcagagagctccatcacaccagtaaggagaagcaatataagtgtgattgcaagaatggtagaggaccgagcacagaaatcttagagatttcttgtcccctctcaggtcatgtgtagatgcgataaatcaagtgattggtgtgcctgggtctcactacaagcagcctatctgcttaagagactctggagtttcttatgtgccctggtggacacttgcccaccatcctgtgagtaaaagtgaaataaaagctttgactagaaaaaaaaaaaaaaaaaa

SEQ ID NO: 94 - protein, 639 aa, Homo sapiens [sequence omitted]

SEQ ID NO: 95 - DNA, 3309 bp, Homo sapiens
gcagaccaaaaccacaagcagaacaagcaggcgtgagacactcacaggttgggtttgatcgcatgcgtgtcggagaggagagagcagagagagacacaggaacaagaacagcaaagggtagagcagacctgcgccaggggcgcacaacggccgtgtccacctcccggccccaagatggtgcttcccacaggcagccacgcgtagcagccagagacagctccagacatgtggctcttcttcgggatcactggattgctgacggcagccctctcaggtcatccatctccagccccacctgaccagctcaacaccagcagtgcagagagtgagctctgggagccaggggagcggcttccggtccgtctgacaaacgggagcagcagctgcagcgggacggtggaggtgcggctcgaggcgtcctgggagcccgcgtgcggggcgctctgggacagccgcgccgccgaggccgtgtgccgagcactgggctgcggcggggcggaggccgcctctcagctcgccccgccgacccctgagctgccgcccccgcctgcagccgggaacaccagcgtagcagctaatgccactctggccggggcgcccgccctcctgtgcagcggcgccgagtggcggctctgcgaggtggtggagcacgcgtgccgcagcgacgggaggcgggcccgtgtcacctgtgcagagaaccgcgcgctgcgcctggtggacggtggcggcgcctgcgccggccgcgtggagatgctggagcatggcgagtggggatcagtgtgcgatgacacttgggacctggaggacgcccacgtggtgtgcaggcaactgggctgcggctgggcagtccaggccctgcccggcttgcacttcacgcccggccgcgggcctatccaccgggaccaggtgaactgctcgggggccgaagcttacctgtgggactgcccggggctgccaggacagcactactgcggccacaaagaggacgcgggcgcggtgtgctcagagcaccagtcctggcgcctgacagggggcgctgaccgctgcgaggggcaggtggaggtacacttccgaggggtctggaacacagtgtgtgacagtgagtggtacccatcggaggccaaggtgctctgccagtccttgggctgtggaactgcggttgagaggcccaaggggctgccccactccttgtccggcaggatgtactactcatgcaatggggaggagctcaccctctccaactgctcctggcggttcaacaactccaacctctgcagccagtcgctggcagccagggtcctctgctcagcttcccggagtttgcacaatctgtccactcccgaagtccctgcaagtgttcagacagtcactatagaatcttctgtgacagtgaaaatagagaacaaggaatctcgggagctaatgctcctcatcccctccatcgttctgggaattctcctccttggctccctcatcttcatagccttcatcctcttgagaattaaaggaaaatatgccctccccgtaatggtgaaccaccagcacctacccaccaccatcccggcagggagcaatagctatcaaccggtccccatcaccatccccaaagaagttttcatgctgcccatccaggtccaggccccgccccctgaggactcagactctggctcggactcagactatgagcactatgacttcagcgcccagcctcctgtggccctgaccaccttctacaattcccagcggcatcgggtcacagatgaggaggtccagcaaagcaggttccagatgccacccttggaggaaggacttgaagagttgcatgcctcccacatcccaactgccaaccctggacactgcattacagacccgccatccctgggccctcagtatcacccgaggagcaacagtgagtcgagcacctcttcaggggaggattactgcaatagtcccaaaagcaagctgcctccatggaacccccaggtgttttcttcagagaggagttccttcctggagcagcccccaaacttggagctggccggcacccagccagccttttcagcagggcccccggctgatgacagctccagcacctcatccggggagtggtaccagaacttccagccaccaccccagcccccttcggaggagcagtttggctgtccagggtcccccagccctcagcctgactccaccgacaacgatgactacgatgacatcagcgcagcctaggccggggccagccgaggctcctggggtggctctgaccctctggcctcctgctctacctactccctttcccctttcccaccctcccagctcacctccccatggagctgagaggcctcccttggagagatggaaggaaacgttataccttgtacccctcggtctccatccatcaagccaaacctgctgccacagccctcccccggccccagatagcagccccagggaggatgctgcctccaagaggtgtgagccctctgtctcggggatgaacaagcagagtctgggctacctcttgacagctggtggaggggagttggggagctggactggatgactctggaggccccttccaaacctcaagtgtccggcgctttgattgcctgagtttctgacacttcagggcccagaggtcctgcgaggggcagaactggacccccatgccagtgctgctgcaggagggcccatatactagggtctgctgagctgttgtcactgatcggtgggcgctgggggggtagggtagcacaccagctgtcccaggctttgctccgggcggtaactgcacttgggcagggaatatagccttcctgggcacaactagctgacaatgacaggttgactgtgtacccccaaccaaggagctggggcccaaggccagtcctgccccagagacactccaagtccgccaggggcacagaccagttctgcagtgactgtccctggacaatgggtctttattctgagtttcctatggtttacaaagagggccccagcccagccccaccacagatcccagagataggggcccagtctccatgggggcaaggagcatagagatgttttccaggaaggggctcagaagctgcactaggccccgagtccccatgtgtctccttgaattgatgaggatgctcctgggagggatgcgtgactatgtggtgttgcacccggggctgcaaacgtctccgtgcagcccccagagagaggcccatgggctcagaccaggctttgttgtcctgctctgagtatcctgagattaaactgaattgctgaatgaaaaaaaaaaaaaaaaaaaaa

SEQ ID NO: 96 - protein, 109 aa, Homo sapiens
MKFISTSLLLMLLVSSLSPVQGVLEVYYTSLRCRCVQESSVFIPRRFIDRIQILPRGNGCPRKEIIVWKKNKSIVCVDPQAEWIQRMMEVLRKRSSSTLPVPVFKRKIP

SEQ ID NO: 97 - DNA, 1219 bp, Homo sapiens
gagaagatgtttgaaaaaactgactctgctaatgagcctggactcagagctcaagtctgaactctacctccagacagaatgaagttcatctcgacatctctgcttctcatgctgctggtcagcagcctctctccagtccaaggtgttctggaggtctattacacaagcttgaggtgtagatgtgtccaagagagctcagtctttatccctagacgcttcattgatcgaattcaaatcttgccccgtgggaatggttgtccaagaaaagaaatcatagtctggaagaagaacaagtcaattgtgtgtgtggaccctcaagctgaatggatacaaagaatgatggaagtattgagaaaaagaagttcttcaactctaccagttccagtgtttaagagaaagattccctgatgctgatatttccactaagaacacctgcattcttcccttatccctgctctggattttagttttgtgcttagttaaatcttttccaggaaaaagaacttccccatacaaataagcatgagactatgtaaaaataaccttgcagaagctgatggggcaaactcaagcttcttcactcacagcaccctatatacacttggagtttgcattcttattcatcagggaggaaagtttctttgaaaatagttattcagttataagtaatacaggattattttgattatatacttgttgtttaatgtttaaaatttcttagaaaacaatggaatgagaatttaagcctcaaatttgaacatgtggcttgaattaagaagaaaattatggcatatattaaaagcaggcttctatgaaagactcaaaaagctgcctgggaggcagatggaacttgagcctgtcaagaggcaaaggaatccatgtagtagatatcctctgcttaaaaactcactacggaggagaattaagtcctacttttaaagaatttctttataaaatttactgtctaagattaatagcattcgaagatccccagacttcatagaatactcagggaaagcatttaaagggtgatgtacacatgtatcctttcacacatttgccttgacaaacttctttcactcacatctttttcactgactttttttgtggggggcggggccggggggactctggtatctaattctttaatgattcctataaatctaatgacattcaataaagttgagcaaacattttacttaaaaaaaaaaaaaaaaaa

SEQ ID NO: 98 - protein, 98 aa, Homo sapiens
MEHSTFLSGLVLATLLSQVCQSCVELDPATVAGIIVTDVIATLLLALGVFCFAGHETGRLSGAADTQALLRNDQVYQPLRDRDDAQYSHLGGNWARNK

SEQ ID NO: 99 - DNA, 771 bp, Homo sapiens
agagaagcagacatcttctagttcctcccccactctcctctttccggtacctgtgagtcagctaggggagggcagctctcacccaggctgatagttcggtgacctggctttatctactggatgagttccgctgggagatggaacatagcacgtttctctctggcctggtactggctacccttctctcgcaagtgagccccttcaagatacctatagaggaacttgaggacagagtgtttgtgaattgcaataccagcatcacatgggtagagggaacggtgggaacactgctctcagacattacaagactggacctgggaaaacgcatcctggacccacgaggaatatataggtgtaatgggacagatatatacaaggacaaagaatctaccgtgcaagttcattatcgaatgtgccagagctgtgtggagctggatccagccaccgtggctggcatcattgtcactgatgtcattgccactctgctccttgctttgggagtcttctgctttgctggacatgagactggaaggctgtctggggctgccgacacacaagctctgttgaggaatgaccaggtctatcagcccctccgagatcgagatgatgctcagtacagccaccttggaggaaactgggctcggaacaagtgaacctgagactggtggcttctagaagcagccattaccaactgtaccttcccttcttgctcagccaataaatatatcctctttcactcagaaaaaaaaaaaaaaaaaaaaaaaaaaaaaa

SEQ ID NO: 100 - protein, 207 aa, Homo sapiens [sequence omitted]

SEQ ID NO: 101 - DNA, 1534 bp, Homo sapiens
tattgtcagagtcctcttgtttggccttctaggaaggctgtgggacccagctttcttcaaccagtccaggtggaggcctctgccttgaacgtttccaagtgaggtaaaacccgcaggcccagaggcctctctacttcctgtgtggggttcagaaaccctcctcccctcccagcctcaggtgcctgcttcagaaaatgaagtagtaagtctgctggcctccgccatcttagtaaagtaacagtcccatgaaacaaagatgcagtcgggcactcactggagagttctgggcctctgcctcttatcagttggcgtttgggggcaagatggtaatgaagaaatgggtggtattacacagacaccatataaagtctccatctctggaaccacagtaatattgacatgccctcagtatcctggatctgaaatactatggcaacacaatgataaaaacataggcggtgatgaggatgataaaaacataggcagtgatgaggatcacctgtcactgaaggaattttcagaattggagcaaagtggttattatgtctgctaccccagaggaagcaaaccagaagatgcgaacttttatctctacctgagggcaagagtgtgtgagaactgcatggagatggatgtgatgtcggtggccacaattgtcatagtggacatctgcatcactgggggcttgctgctgctggtttactactggagcaagaatagaaaggccaaggccaagcctgtgacacgaggagcgggtgctggcggcaggcaaaggggacaaaacaaggagaggccaccacctgttcccaacccagactatgagcccatccggaaaggccagcgggacctgtattctggcctgaatcagagacgcatctgaccctctggagaacactgcctcccgctggcccaggtctcctctccagtccccctgcgactccctgtttcctgggctagtcttggaccccacgagagagaatcgttcctcagcctcatggtgaactcgcgccctccagcctgatcccccgctccctcctccctgccttctctgctggtacccagtcctaaaatattgctgcttcctcttcctttgaagcatcatcagtagtcacaccctcacagctggcctgccctcttgccaggatatttatttgtgctattcactcccttccctttggatgtaacttctccgttcagttccctccttttcttgcatgtaagttgtcccccatcccaaagtattccatctacttttctatcgccgtccccttttgcagccctctctggggatggactgggtaaatgttgacagaggccctgccccgttcacagatcctggccctgagccagccctgtgctcctccctcccccaacactccctaccaaccccctaatcccctactccctccaccccccctccactgtaggccactggatggtcatttgcatctccgtaaatgtgctctgctcctcagctgagagagaaaaaaataaactgtatttggctgcaagaaaaaaaaaaaaaaaaaaaaaa

SEQ ID NO: 102 - protein, 182 aa, Homo sapiens
MEQGKGLAVLILAIILLQGTLAQSIKGNHLVKVYDYQEDGSVLLTCDAEAKNITWFKDGKMIGFLTEDKKKWNLGSNAKDPRGMYQCKGSQNKSKPLQVYYRMCQNCIELNAATISGFLFAEIVSIFVLAVGVYFIAGQDGVRQSRASDKQTLLPNDQLYQPLKDREDDQYSHLQGNQLRRN

SEQ ID NO: 103 - DNA, 1311 bp, Homo sapiens
agtctagctgctgcacaggctggctggctggctggctgctaagggctgctccacgcttttgccggaggacagagactgacatggaacaggggaagggcctggctgtcctcatcctggctatcattcttcttcaaggtactttggcccagtcaatcaaaggaaaccacttggttaaggtgtatgactatcaagaagatggttcggtacttctgacttgtgatgcagaagccaaaaatatcacatggtttaaagatgggaagatgatcggcttcctaactgaagataaaaaaaaatggaatctgggaagtaatgccaaggaccctcgagggatgtatcagtgtaaaggatcacagaacaagtcaaaaccactccaagtgtattacagaatgtgtcagaactgcattgaactaaatgcagccaccatatctggctttctctttgctgaaatcgtcagcattttcgtccttgctgttggggtctacttcattgctggacaggatggagttcgccagtcgagagcttcagacaagcagactctgttgcccaatgaccagctctaccagcccctcaaggatcgagaagatgaccagtacagccaccttcaaggaaaccagttgaggaggaattgaactcaggactcagagtagtccaggtgttctcctcctattcagttcccagaatcaaagcaatgcattttggaaagctcctagcagagagactttcagccctaaatctagactcaaggttcccagagatgacaaatggagaagaaaggccatcagagcaaatttgggggtttctcaaataaaataaaaataaaaacaaatactgtgtttcagaagcgccacctattggggaaaattgtaaaagaaaaatgaaaagatcaaataaccccctggatttgaatataattttttgtgttgtaatttttatttcgtttttgtataggttataattcacatggctcaaatattcagtgaaagctctccctccaccgccatcccctgctacccagtgaccctgttgccctcttcagagacaaattagtttctcttttttttttttttttttttttttttgagacagtctggctctgtcacccaggctgaaatgcagtggcaccatctcggctcactgcaacctctgcctcctgggttcaagcgattctcctgcctcagcctcccgggcagctgggattacaggcacacactaccacacctggctaatttttgtatttttagtagagacagggttttgctctgttggccaagctggtctcgaactcctgacctcaagtgatccgcccgcctc

SEQ ID NO: 104 - protein, 509 aa, Homo sapiens
MGCGCSSHPEDDWMENIDVCENCHYPIVPLDGKGTLLIRNGSEVRDPLVTYEGSNPPASPLQDNLVIALHSYEPSHDGDLGFEKGEQLRILEQSGEWWKAQSLTTGQEGFIPFNFVAKANSLEPEPWFFKNLSRKDAERQLLAPGNTHGSFLIRESESTAGSFSLSVRDFDQNQGEVVKHYKIRNLDNGGFYISPRITFPGLHELVRHYTNASDGLCTRLSRPCQTQKPQKPWWEDEWEVPRETLKLVERLGAGQFGEVWMGYYNGHTKVAVKSLKQGSMSPDAFLAEANLMKQLQHQRLVRLYAVVTQEPIYIITEYMENGSLVDFLKTPSGIKLTINKLLDMAAQIAEGMAFIEERNYIHRDLRAANILVSDTLSCKIADFGLARLIEDNEYTAREGAKFPIKWTAPEAINYGTFTIKSDVWSFGILLTEIVTHGRIPYPGMTNPEVIQNLERGYRMVRPDNCPEELYQLMRLCWKERPEDRPTFDYLRSVLEDFFTATEGQYQPQP

SEQ ID NO: 105 - DNA, 1973 bp, Homo sapiens
  misc_feature (899)..(998): n is a, c, g, or t
gaattcgaactgttgccctactctccaaccatgattaatgggtgttgtcctggcctctgactacagcaggggccgttactatgccctcttgaagacatgaggttgtcctgtctgcctcctgaaacaggctgttttccagcattctgtctgtaagagggatggtagcctgccattcacctacccttgactataataaagctactgttccatgccctgagatgacatgggaattgttctctcggcctgacctgactgtaacatgcatggtctgctcaccagctatttaacagggatattgtcctctcctctgactctgatacgatgctacctttgctgccagacagaaaccaaaagggtctctcagctgcaactggtggtgctgaggtgctgtttgcctctcaccataagctgagtgtgtgtccgcttgccccctgctcactgggcccaaaggctgcccttgaatctcttgcccagatgcaccctggagggcagaagggagggtctatcagacatcctcccctcaactttaaacctcccagtgtcaccctgggacagtaggggaagatggacctggtctggagatgtaggggacccccaggggctgagaggcaggggtctatggtggcaggaagcttggcgtgctagagggttgtggttgggctgctggggcccggttggctgcggagcctccggaggaggcaggaagtcagggtgggacgtgggcgcggggagacaggtggtggctacgacggcgaagggagctgagactgtccaggcagccaggttaggccaggaggaccatgtgaatggggccagagggctcccgggctgggcaggtaaggagcgctggtattgggcgcaggcgccggggtgagaggcctgatagcagacgctgcagnnnnnnnnnnnnnnnnnnnnnnnnnnnnnnnnnnnnnnnnnnnnnnnnnnnnnnnnnnnnnnnnnnnnnnnnnnnnnnnnnnnnnnnnnnnnnnnnnnnngggactccgggggcttcaaagttgagggccccacctctgcttcagcgcaaaacaggcacacatttatcactttactcctatggagttctgcttgatttcatcagacaaaaaatttccactcctaaaacacggcaaataaacaaaaaaaaagttatggccaaccagagtcactggagggttttctcctggggagaagcaagcccgtgtttgaaggaaccctgtgagatgactgtgggctgtgtgaggggaacagcgggggcttgatggtggacttcgggagcagaagcctctttctcagcctcctcagctagacaggggaattataataggaggtgtggcgtgcacacctctccagtaggggagggtctgataagtcaggtctctcccaggcttgggaaagtgtgtgtcatgctctaggaggtggtcctcccaacacagggtactggcagagggagagggagggggcagaggcaggaagtgggtaactagactaacaaaggtgcctgtggcggtttgcccatcccaggtggggagggtggggctagggctcaggggccgtgtgtgaatttacttgtagcctgagggctcagagggagcaccggtttggagctgggaccccctattttagcttttctgtggctggtgaatggggatcccaggatctcacaatctcaggtacttttggaactttccagggcaaggccccattatatctgatgttgggggagcagatcttgggggagccccttcagccccctcttccattccctcagggaccatgggctgtggctgcagctcacacccggaagatgactggatggaaaacatcgatgtgtgtgagaactgccattatcccatagtcccactggatggcaagggcacggtaagaggcgagacaggggccttggtgagggagttgggtagagaatgcaacccaggagaaagaaatgaccagcacttacaggcccttgaaag

SEQ ID NO: 106 - protein, 273 aa, Homo sapiens [sequence omitted]

SEQ ID NO: 107 - DNA, 419 bp, Homo sapiens
atggcctctgcacccatctcgatgcttgcgatgctcttcacattgagtgggctgagagctcagtcagtggctcagcggaagatcaggtcaacgttgctgaagggaatcctctgactgtgaaatgcacctattcagtctctggaaacccttatcttttttggtatgttcaataccccaaccgaggcctccagttccttctgaaatacatcacaggggataacctggttaaaggcagctatggctttgaagctgaatttaacaagagccaaacctccttccacctgaagaaaccatctgcccttgtgagcgactccgctttgtacttctgtgctgtgagacccgacagaggctcaaccctggggaggctatactttggaagaggaactcagttgactgtctggcctgatatccagaaccct

SEQ ID NO: 108 - protein, 140 aa, Homo sapiens
VAFCLLVEELIEAGVVQSPRYKIIEKKQPVAFWCNPISGHNTLYWYLQNLGQGPELLIRYENEEAVDDSQLPKDRFSAERLKGVDSTLKIQPAELGDSAVYLCASSSTGFNTGELFFGEGSRLTVLEDLKNVFPPEVAVF

SEQ ID NO: 109 - DNA, 339 bp, Homo sapiens
atgggctgcaggctgctctgctgtgcggttctctgtctcctgggagcggtccccatggaaacgggagttacgcagacaccaagacacctggtcatgggaatgacaaataagaagtctttgaaatgtgaacaacatctgggtcataacgctatgtattggtacaagcaaagtgctaagaagccactggagctcatgtttgtctacagtcttgaagaacgtgttgaaaacaacagtgtgccaagtcgcttctcacctgaatgccccaacagctctcacttattccttcacctacacaccctgcagccagaagactcggccctgtatctctgcgccagcagc

SEQ ID NO: 110 - protein, 145 aa, Homo sapiens
MATWALLLLAAMLLGNPGLVFSRLSPEYYDLARAHLRDEEKSCPCLAQEGPQGDLLTKTQELGRDYRTCLTIVQKLKKMVDKPTQRSVSNAATRVCRTGRSRWRDVCRNFMRRYQSRVTQGLVAGETAQQICEDLRLCIPSTGPL

SEQ ID NO: 111 - DNA, 924 bp, Homo sapiens
gtatctgtggtaaacccagtgacacgggggagatgacatacaaaaagggcaggacctgagaaagattaagctgcaggctccctgcccataaaacagggtgtgaaaggcatctcagcggctgccccaccatggctacctgggccctcctgctccttgcagccatgctcctgggcaacccaggccttgaggtcagtgtgagccccaagggcaagaacacttctggaagggagagtggatttggctgggccatctggatggaaggtctggtcttctctcgtctgagccctgagtactacgacctggcaagagcccacctgcgtgatgaggagaaatcctgcccgtgcctggcccaggagggcccccagggtgacctgttgaccaaaacacaggagctgggccgtgactacaggacctgtctgacgatagtccaaaaactgaagaagatggtggataagcccacccagagaagtgtttccaatgctgcgacccgggtgtgtaggacggggaggtcacgatggcgcgacgtctgcagaaatttcatgaggaggtatcagtctagagttacccagggcctcgtggccggagaaactgcccagcagatctgtgaggacctcaggttgtgtataccttctacaggtcccctctgagccctctcaccttgtcctgtggaagaagcacaggctcctgtcctcagatcccgggaacctcagcaacctctgccggctcctcgcttcctcgatccagaatccactctccagtctccctcccctgactccctctgctgtcctcccctctcacgagaataaagtgtcaagcaagattttagccgcagctgcttcttctttggtggatttgaggggtgggtgtcagtggcatgctggggtgagctgtgtagtccttcaataaatgtctgtcgtgtgtccc

SEQ ID NO: 112 - protein, 262 aa, Homo sapiens
MRNSYRFLASSLSVVVSLLLIPEDVCEKIIGGNEVTPHSRPYMVLLSLDRKTICAGALIAKDWVLTAAHCNLNKRSQVILGAHSITREEPTKQIMLVKKEFPYPCYDPATREGDLKLLQLTEKAKINKYVTILHLPKKGDDVKPGTMCQVAGWGRTHNSASWSDTLREVNITIIDRKVCNDRNHYNFNPVIGMNMVCAGSLRGGRDSCNGDSGSPLLCEGVFRGVTSFGLENKCGDPRGPGVYILLSKKHLNWIIMTIKGAV

SEQ ID NO: 113 - DNA, 913 bp, Homo sapiens
agattttcaggttgattgatgtgggacagcagccacaatgaggaactcctatagatttctggcatcctctctctcagttgtcgtttctctcctgctaattcctgaagatgtctgtgaaaaaattattggaggaaatgaagtaactcctcattcaagaccctacatggtcctacttagtcttgacagaaaaaccatctgtgctggggctttgattgcaaaagactgggtgttgactgcagctcactgtaacttgaacaaaaggtcccaggtcattcttggggctcactcaataaccagggaagagccaacaaaacagataatgcttgttaagaaagagtttccctatccatgctatgacccagccacacgcgaaggtgaccttaaacttttacagctgacggaaaaagcaaaaattaacaaatatgtgactatccttcatctacctaaaaagggggatgatgtgaaaccaggaaccatgtgccaagttgcagggtggggcaggactcacaatagtgcatcttggtccgatactctgagagaagtcaatatcaccatcatagacagaaaagtctgcaatgatcgaaatcactataattttaaccctgtgattggaatgaatatggtttgtgctggaagcctccgaggtggaagagactcgtgcaatggagattctggaagccctttgttgtgcgagggtgttttccgaggggtcacttcctttggccttgaaaataaatgcggagaccctcgtgggcctggtgtctatattcttctctcaaagaaacacctcaactggataattatgactatcaagggagcagtttaaataaccgtttcctttcatttactgtggcttcttaatcttttcacaaataaaatcaatttgcatgactgtaaaaaaaaaaaaaaaaaa

SEQ ID NO: 114 - protein, 247 aa, Homo sapiens
MQPILLLLAFLLLPRADAGEIIGGHEAKPHSRPYMAYLMIWDQKSLKRCGGFLIRDDFVLTAAHCWGSSINVTLGAHNIKEQEPTQQFIPVKRPIPHPAYNPKNFSNDIMLLQLERKAKRTRAVQPLRLPSNKAQVKPGQTCSVAGWGQTAPLGKHSHTLQEVKMTVQEDRKCESDLRHYYDSTIELCVGDPEIKKTSFKGDSGGPLVCNKVAQGIVSYGRNNGMPPRACTKVSSFVHWIKKTMKRY

SEQ ID NO: 115 - DNA, 941 bp, Homo sapiens
ccaagagctaaaagagagcaaggaggaaacaacagcagctccaaccagggcagccttcctgagaagatgcaaccaatcctgcttctgctggccttcctcctgctgcccagggcagatgcaggggagatcatcgggggacatgaggccaagccccactcccgcccctacatggcttatcttatgatctgggatcagaagtctctgaagaggtgcggtggcttcctgatacgagacgacttcgtgctgacagctgctcactgttggggaagctccataaatgtcaccttgggggcccacaatatcaaagaacaggagccgacccagcagtttatccctgtgaaaagacccatcccccatccagcctataatcctaagaacttctccaacgacatcatgctactgcagctggagagaaaggccaagcggaccagagctgtgcagcccctcaggctacctagcaacaaggcccaggtgaagccagggcagacatgcagtgtggccggctgggggcagacggcccccctgggaaaacactcacacacactacaagaggtgaagatgacagtgcaggaagatcgaaagtgcgaatctgacttacgccattattacgacagtaccattgagttgtgcgtgggggacccagagattaaaaagacttcctttaagggggactctggaggccctcttgtgtgtaacaaggtggcccagggcattgtctcctatggacgaaacaatggcatgcctccacgagcctgcaccaaagtctcaagctttgtacactggataaagaaaaccatgaaacgctactaactacaggaagcaaactaagcccccgctgtaatgaaacaccttctctggagccaagtccagatttacactgggagaggtgccagcaactgaataaatacctcttagctgagtggaaaaaaaaaaaaaaaaaa

SEQ ID NO: 116 - protein, 246 aa, Homo sapiens
MQPFLLLLAFLLTPGAGTEEIIGGHEAKPHSRPYMAFVQFLQEKSRKRCGGILVRKDFVLTAAHCQGSSINVTLGAHNIKEQERTQQFIPVKRPIPHPAYNPKNFSNDIMLLQLERKAKWTTAVRPLRLPSSKAQVKPGQLCSVAGWGYVSMSTLATTLQEVLLTVQKDCQCERLFHGNYSRATEICVGDPKKTQTGFKGDSGGPLVCKDVAQGILSYGNKKGTPPGVYIKVSHFLPWIKRTMKRL

SEQ ID NO: 117 - DNA, 987 bp, Homo sapiens
gaggtctctgagtttactgtacccatccctccttcatctccctccagcatttgtttctggaaggagtcaacaccaacagctctgacctgggcagccttcctgagaaaatgcagccattcctcctcctgttggcctttcttctgacccctggggctgggacagaggagatcatcgggggccatgaggccaagccccactcccgcccctacatggcctttgttcagtttctgcaagagaagagtcggaagaggtgtggcggcatcctagtgagaaaggactttgtgctgacagctgctcactgccagggaagctccataaatgtcaccttgggggcccacaatatcaaggaacaggagcggacccagcagtttatccctgtgaaaagacccatcccccatccagcctataatcctaagaacttctccaacgacatcatgctactgcagctggagagaaaggccaagtggaccacagctgtgcggcctctcaggctacctagcagcaaggcccaggtgaagccagggcagctgtgcagtgtggctggctggggttatgtctcaatgagcactttagcaaccacactgcaggaagtgttgctgacagtgcagaaggactgccagtgtgaacgtctcttccatggcaattacagcagagccactgagatttgtgtgggggatccaaagaagacacagaccggtttcaagggggactccggggggcccctcgtgtgtaaggacgtagcccaaggtattctctcctatggaaacaaaaaagggacacctccaggagtctacatcaaggtctcacacttcctgccctggataaagagaacaatgaagcgcctctaacagcaggcatgagactaaccttcctctgggcctgaccatctctgggacagaggcaagaatccccaaggggtgggcagtcggggttgcaggactgtaataaatggatctctggtgtaaatatgaaaaaaaaaaaaaaaaa

SEQ ID NO: 118 - protein, 264 aa, Homo sapiens
MTKFSSFSLFFLIVGAYMTHVCFNMEIIGGKEVSPHSRPFMASIQYGGHHVCGGVLIDPQWVLTAAHCQYRFTKGQSPTVVLGAHSLSKNEASKQTLEIKKFIPFSRVTSDPQSNDIMLVKLQTAAKLNKHVKMLHIRSKTSLRSGTKCKVTGWGATDPDSLRPSDTLREVTVTVLSRKLCNSQSYYNGDPFITKDMVCAGDAKGQKDSCKGDSGGPLICKGVFHAIVSGGHECGVATKPGIYTLLTKKYQTWIKSNLVPPHTN

SEQ ID NO: 119 - DNA, 1074 bp, Homo sapiens
gatcaacacatttcatctgggcttcttaaatctaaatctttaaaatgactaagttttcttccttttctctgtttttcctaatagttggggcttatatgactcatgtgtgtttcaatatggaaattattggagggaaagaagtgtcacctcattccaggccatttatggcctccatccagtatggcggacatcacgtttgtggaggtgttctgattgatccacagtgggtgctgacagcagcccactgccaatatcggtttaccaaaggccagtctcccactgtggttttaggcgcacactctctctcaaagaatgaggcctccaaacaaacactggagatcaaaaaatttataccattctcaagagttacatcagatcctcaatcaaatgatatcatgctggttaagcttcaaacagccgcaaaactcaataaacatgtcaagatgctccacataagatccaaaacctctcttagatctggaaccaaatgcaaggttactggctggggagccaccgatccagattcattaagaccttctgacaccctgcgagaagtcactgttactgtcctaagtcgaaaactttgcaacagccaaagttactacaacggcgacccttttatcaccaaagacatggtctgtgcaggagatgccaaaggccagaaggattcctgtaagggtgactcagggggccccttgatctgtaaaggtgtcttccacgctatagtctctggaggtcatgaatgtggtgttgccacaaagcctggaatctacaccctgttaaccaagaaataccagacttggatcaaaagcaaccttgtcccgcctcatacaaattaagttacaaataattttattggatgcacttgcttcttttttcctaatatgctcgcaggttagagttgggtgtaagtaaagcagagcacatatggggtccatttttgcacttgtaagtcattttattaaggaatcaagttctttttcacttgtatcactgatgtatttctaccatgctggttttattctaaataaaatttagaagactcaaaaaaaaaaaaaaaaaaaaaaaaaaaaa

SEQ ID NO: 120 - protein, 555 aa, Homo sapiens
MAARLLLLGILLLLLPLPVPAPCHTAARSECKRSHKFVPGAWLAGEGVDVTSLRRSGSFPVDTQRFLRPDGTCTLCENALQEGTLQRLPLALTNWRAQGSGCQRHVTRAKVSSTEAVARDAARSIRNDWKVGLDVTPKPTSNVHVSVAGSHSQAANFAAQKTHQDQYSFSTDTVECRFYSFHVVHTPPLHPDFKRALGDLPHHFNASTQPAYLRLISNYGTHFIRAVELGGRISALTALRTCELALEGLTDNEVEDCLTVEAQVNIGIHGSISAEAKACEEKKKKHKMTASFHQTYRERHSEVVGGHHTSINDLLFGIQAGPEQYSAWVNSLPGSPGLVDYTLEPLHVLLDSQDPRREALRRALSQYLTDRARWRDCSRPCPPGRQKSPRDPCQCVCHGSAVTTQDCCPRQRGLAQLEVTFIQAWGLWGDWFTATDAYVKLFFGGQELRTSTVWDNNNPIWSVRLDFGDVLLATGGPLRLQVWDQDSGRDDDLLGTCDQAPKSGSHEVRCNLNHGHLKFRYHARCLPHLGGGTCLDYVPQMLLGEPPGNRSGAVW

SEQ ID NO: 121 - DNA, 6218 bp, Homo sapiens
gaattccaaagtcctctctttgattttataggtgaggaaactaacgctcagaaagggggttgatatctatcgccgtgaggcatacggtaagtttctggtgaagctgggatcagaacctgtttagactttgcctctcttttcccgcagatactttgcaggacttctatgtccctcaaaccggccttcctgtcatggtcaggaaagaaactcctcacagcctcagcatccaagtcaggccatgggtgacagctggaaagtgatcaggaggctgcagtttctagaagagggtggggacactgcggagagaagatggggccagattccgagaagacagcataagcccctgttcctgtaagagcagggacggaagcagggacataaacgcaagggatgagccccaaagtgtgacccatgagacatgatgtcacatgtggtctggagcctgccccacttcttcccatcatatacacagttatgagaacaagttgtgagaaccacctcctcccttacccagctgcccccaccccagaagccgtgtgattttgccccccagtgccctgtgagtcactccacccatggaaacctcaccccaccctgacctcaagcaaggcagagtgcagaagacatgtcctccggtgctaccagaccactctcaccagcacccacgacctcagcagggctggagccagcgtggaggccactggctgtcctcacaaagcgaggagcaggagcccctgttcgaggaacatgcttggagttcggagcctgggctagggtgggatgtaggttgagcaggaagtggatggcaagattagagcaacatctctcttctcccactcagggaggagggaatggccacaggctctgacactcaagaagggccaggcacagttccaagcacttcacaacaacccctagggtctacatgacctacaatcccaattgttcagtgaagaaactgaggcacagtgaggctgaagaaccctaccagtccacactgctggtgcataaccgagctgcccaagccccggcggtctggcgtgtaggcccatgctctgagccgccgcctctgcttgcctcttacatcccacacatgcgatgctgtgcatcagaagcaaggagatggccctgctggcctgttcatcaacaccagggccgagtctcaaagtcctcagcgccccgccctcctccgcctgtgtgccctgagtccccgagccccagcagctctactcggcagatgagcctctggccctgctgctcgcttcctgagggctgtcagtggggagccggatgagggctgaggacagggtgggtgctcgtgggaggggagagcacaaaggacctgtgaccacagctgggggcggggcaggaagtagaagtgatgtgagtggtggctggtgcaaggagccacagtgggctgcctggggggctgatgccaccattccaggagcctcggtgaagagaggatatccatctgtgtagccgcttctctatacgggattccaggtaaggagagagcagggattgggggcctggggccctgggtggaggggaagaggctgatggagcaggaagtgctgtgacctataagacaagacacctgggtcacagacggtgcccatcactaactcgctgggcagccctgtgtccaccctgggcctcagtttcctcatgtatgaaatgaagaggtagcgtgcagtttctaaggccctgcaagtgctgacattaaagcttctaagaaagctggaaagaggctccctgggacagaataccatgagagtcaggatgagggctgagttcactggattagggttatgactgtgcccgcctcctagctgggatgagcccagggcctttgaagattcccctggcctctttgcctccctggggcgagccacgctgcctgaaattccacccttcaagtcacacctttgggcagggcaggaggctccagctataatgggggctctccatagccctcttgtctcagaacctgtggtacccaagggcaaaggcctttgaagagctcagcttggataaggttaggcttgggtaaggttagagaaaggaggttccagatcataaacaggcccaggcaaggccccagaaacaccttaaaattaggaagaaccttccagacaatcattgtccatagtaggcaataggggggcccctgtcactgccgaaggccacagagcttggcagggagtggcaaagaggggaggggcagcaagaaaggatctgaagagcaaccatcgaggcctctccccacacaaaatccaagggtgtggtcaggtctgcccctttttcttttttttctttctcttttttttttttttttttttttgaggcagagtcttactctatcacccaggcgggagtgcagtggtacgatcttggctcactgcaacctccgcctcctgggttcaagcgattctcctgtctcagcctcccaagtagctgggattacaggcacccgccaccatgcccagctaatttttgtatttttagtaaagagggggtttcaccacgttggccaggctggtctcgaacttctgacctccagtgatccacctgcctctgcctcccacagtgttcggtttacaggtgtgagccaccacacctggccaggtcggcagattttattctagaattcgggctgatgttattccataaagctcagagggagagcgccaaagggaaaatgagaagaataggtgcaatataggacctcatttctcttccaattctgttaagggctcagtgggagggagagaggttagagagagtgacagagacaaagaaacagagtgagagtcagggtgggcaaagggtggcttgttctggggccaaaaatgacacttcttcagaatgaaggcttcctcaggtccccagacccctccctaaacctgctacagctactctgtcccctcttctgtggccacagccccctccccaccacccacagttgtgtcctggggacagagccatccacctagatccccattaggccttagggaaattctaaaaaggggctccccttggctgggcttttcccctctctgggcccatctgtacaatgtgggggctgaaccaggcctataagggacataccagctctgacattcattgaataatgacttaagagatatctcagcccctccccttccatgtgccctgataatctgtggctgtgggggaagggagcagtcatcctccatccctccacccatggcttcccagagcccaagtgccccctgtctctgcagctccatggcagcccgtctgctcctcctgggcatccttctcctgctgctgcccctgcccgtccctgccccgtgccacacagccgcacgctcagagtgcaagcgcagccacaagttcgtgcctggtgcatggctggccggggagggtgtggacgtgaccagcctccgccgctcgggctccttcccagtggacacacaaaggttcctgcggcccgacggcacctgcaccctctgtgaaaatgccctacaggagggcaccctccagcgcctgcctctggcgctcaccaactggcgggcccagggctctggctgccagcgccatgtaaccagggccaaagtcagctccactgaagctgtggcccgggatgcggctcgtagcatccgcaacgactggaaggtcgggctggacgtgactcctaagcccaccagcaatgtgcatgtgtctgtggccggctcacactcacaggcagccaactttgcagcccagaagacccaccaggaccagtacagcttcagcactgacacggtggagtgccgcttctacaggtgagagctggggctaggggtggggggctggaaaaggcgcgggaaactctgggtggtctaagagccctggaaaggcagagttctccaatcaaacttggaggctgcttccaccaggaagaaactgcaatcctggctctcagacttcaggtgattcagccctgtggcctcctctcatccaggaggtcccaaatctgggagtgcccagtgagacatcaagtagagagaaagtgagtgagaccatgcctgagagtcccagcagggtgccatttaggtctagtgagtactgaaccctgcctttcctgggcacagccagccttccacagagtccttcctggatagggacagaggcaggagacctggccgggtcatccttcctcatcgctgtgtgaccttgagcatctcacttctctctgagcttcaatcatccactcaaccaatactcacacctgcctgtggcagggccacactgctgagcgacagcagtcactaccctagcccctgggagtaggaagtatgggacccatattccacgtctgagaaaggcacagtgtttgtaggccagacccaagtcacctggtctgattcatcagacctgggggccacgtttcctccacagagaggccgagcatggcccaagctgtcaggatcccgggcatgtgggacccatccagggggacggatggatgaaggccacatgactagttccaaagttcgacagataccatcagtgcaggatcattgcttttatgttcttttttactttttcttaaaaaaaaaatagagatggggtctcactatgttgcccaggctggtctcaaactcctgggctcaagtgatcctcccgcctcggcctcccaaagtgctggggttacaggcatgaaccactgctcccggccaggatcattgcttttataataagaaaattaaaaggaaagaaaaaaatgttattttgaaaaggaaaagagaaaatacctatacagagcactgaggtccctgaggggtgagagcggaggcattcctgccagccccgtgccactgtgcttgtgctctggagccgggcccctgggttccagtcctagttctgcccacttacatgtgaccttgagcagtcctgaaggagttatttgattgaatgggggaaatactcccctgggcccagctgaggtctctctcttctcgcagtttccatgtggtacacactcccccgctgcaccctgacttcaagagggccctcggggacctgccccaccacttcaacgcctccacccagcccgcctacctcaggcttatctccaactacggcacccacttcatccgggctgtggagctgggtggccgcatatcggccctcactgccctgcgcacctgcgagctggccctggaagggctcacggacaacgaggtggaggactgcctgactgtcgaggcccaggtcaacataggcatccacggcagcatctctgccgaagccaaggcctgtgaggagaagaagaagaagcacaagatgacggcctccttccaccaaacctaccgggagcgccactcggaagtggttggcggccatcacacctccattaacgacctgctgttcgggatccaggccgggcccgagcagtactcagcctgggtaaactcgctgcccggcagccctggcctggtggactacaccctggaacccctgcacgtgctgctggacagccaggacccgcggcgggaggcactgaggagggccctgagtcagtacctgacggacagggctcgctggagggactgcagccggccgtgcccaccagggcggcagaagagcccccgagacccatgccagtgtgtgtgccatggctcagcggtcaccacccaggactgctgccctcggcagaggggcctggcccagctggaggtgaccttcatccaagcatggggcctgtggggggactggttcactgccacggatgcctatgtgaagctcttctttggtggccaggagctgaggacgagcaccgtgtgggacaataacaaccccatctggtcagtgcggctggattttggggatgtgctcctggccacaggggggcccctgaggttgcaggtctgggatcaggactctggcagggacgatgacctccttggcacctgtgatcaggctcccaagtctggttcccatgaggtgagatgcaacctgaatcatggccacctaaaattccgctatcatgccaggtgcttgccccacctgggaggaggcacctgcctggactatgtcccccaaatgcttctgggggagcctccaggaaaccggagtggggccgtgtggtgagaacagtgagcttggaaaggaccagtatgcttggactgaaggggttctcacagtgggagccagggctgtcttcgtattcccattagaccaagctt

SEQ ID NO: 122 - protein, 557 aa, Homo sapiens [sequence omitted]

SEQ ID NO: 123 - DNA, 8743 bp, Homo sapiens
ggatcctctcgcctcggcctcctaaagtattgggattacaggcatgagcctctgtgcctggctgtaactgacatgttttaagcaggggaatgacatgctctagtgaaagccagtctgggcagctgggtagctaatgaggggattagagagattttgttgaatgaaaggcagattgagtcctgctactcgcccccttcattccccttcattcatgcctcattcttccgcctcccagccgcctcaactggccaaagggaagtggaggccctgccacctgtagggagggtcccctggggcttgcccacagcaaacaggaagtcacagcctggtgagatgggcctgggaatcagccactgagaaagtgggtctcttgggtccctgaattctttttctgagtccctgcagcagtgaaaaagacacagaggcacatagagagtgacagagaaagagagagacagagaggagaggcatggggcagaataagaacagatttaggagttagaactcctgggttcttttaaaacaatttttcttttagagacagggtcttgttgtgttgcccggactggagcacagtggctattcccaggcataatcatggtgcactgcagccttgaactcctgggctcaagcgatccttctacctcagcctcccaaggacctgggaccataggcgtgtaccactgtgcctggcttttgcctggttttaaactgaggcagtatgacttgagctcttaggcattaattgaagctgtatctcattaactgagggcttatgatgtgctggacactgggctaatagtgctgaacatattgtcatttttaatcttcacaaacaatatttgtataggactgttttcttttcttttttttttttgaaacagagtctcactctggtgcccaggctggagtgcagtggtgtgatctcggctcactgcaacctccgcctcctggtttccagtgattctcctgcctcagcctcctaagtagctgggattacaggtgtgcgccaccatgcccggctaatttttttttttttttttgagaaggagtctatgtgcccagcattgttctagagcacttgcaattagtggtgaacaacacggtctctactccaaggggctcacattcttgtgcagaaaacagaaatgaacaaataaacacacaagatcatttcccgtggtagtgagagctgggatgaaaataaaacagcgtggcagggaggaggcaagtgttgtgagtctggagggttcctggagaatggggcctgaggcgtgaccaccgccttcctctctggggggactgcctgccgcccccgcagacacccatggttgagtgccctccaggcccctgcctgccccagcatcccctgcgcgaagctgggtgccccggagagtctgaccaccatgccacctcctcgcctcctcttcttcctcctcttcctcacccccatggaagtcaggcccgaggaacctctagtggtgaaggtggaaggtatgtccaaagggcagaaagggaagggattgaggctggaaacttgagttgtggctgggtgtccttggctgagtaacttaccctctctgagcctccattttcttatttgtaaaattcaggaaagggttggaaggactctgccggctcctccactcccagcttttggagtcctctgctctataacctggtgtgaggagtcggggggcttggaggtcccccccacccatgcccacacctctctccctctctctccacagagggagataacgctgtgctgcagtgcctcaaggggacctcagatggccccactcagcagctgacctggtctcgggagtccccgcttaaacccttcttaaaactcagcctggggctgccaggcctgggaatccacatgaggcccctggcatcctggcttttcatcttcaacgtctctcaacagatggggggcttctacctgtgccagccggggcccccctctgagaaggcctggcagcctggctggacagtcaatgtggagggcagcggtgagggccgggctggggcaggggcaggaggagagaagggaggccaccatggacagaagaggtccgcggccacaatggagctggagagaggggctggagggattgagggcgaaactcggagctaggtgggcagactcctggggcttcgtggcttcagtatgagctgcttcctgtccctctacctctcactgtcttctctctctctgcgggtctttgtctctatttatctctgtctttgagtctctatctctctccctctcctgggtgtctctgcatttggttctgggtctcttcccaggggagctgttccggtggaatgtttcggacctaggtggcctgggctgtggcctgaagaacaggtcctcagagggccccagctccccttccgggaagctcatgagccccaagctgtatgtgtgggccaaagaccgccctgagatctgggagggagagcctccgtgtgtcccaccgagggacagcctgaaccagagcctcagccagggtatggtgatgactggggagatgccgggaagcgggggtccagagacagaggggaggggaaactgaagaggtgaaaccctgaggatcaggctttccttgtcttatctctccctgtcccagacctcaccatggcccctggctccacactctggctgtcctgtggggtaccccctgactctgtgtccaggggccccctctcctggacccatgtgcaccccaaggggcctaagtcattgctgagcctagagctgaaggacgatcgcccggccagagatatgtgggtaatggagacgggtctgttgttgccccgggccacagctcaagacgctggaaagtattattgtcaccgtggcaacctgaccatgtcattccacctggagatcactgctcggccaggtagagtttctctcaactgggaggcatctgtgtgggggtactgggaagaagtggaagccagtcaatcttagattcccccaacccgagggctactcccagcctcaccccaaaccccaacttccacacagaacactgactccaagtctttcttttttttgacagagtctcgctctgttgcctaggctggagtgcagtggtgccatcttgtcttggctcactgcaacctccgcctcccaggttcaagtgattcccctgcctcagcctcctgagtagctgggattacaggtgcccaccaccacgcctggctaattttttttttttttttgagacggagtcttgcactgtcacccaggctggagtgcagtggcacgatctcagctcactgcaacctccaccttccaggttcaagtgattctcctgcctcagcctcccgagtagctgggattaaagcctggctaattttttttgtatttttagtagagatggggtttcattatgttggccaggctggtctcaaactcctgacctcgtgatccacccgcctcggcctcccaaagtgctgggattacagacatgagccacagggccgggccaagcctaattttgtatttttagtagagatggggtttctccctgttggaccaggctggtcttgaactcctgacttcaggtgatctgcctgccttggcctcccaaagtactgggattacaggcataagccaccgcacctggcctagacttcaagtctttcttccctcgcttccaagacactacttttctgggtcttcacctaccattgcttgcgcctgcccaccagcttgggtggagtcttccttcctccccaactcctcactcttggagccctgggccctcttcttatccctgtctgcacactttcctatttgaacttgactctcaatggcttcttgggtcaccatgccttggtgactctattccaggctccatactcagccatctcctgtgccatttgatatcccatggacacctcaggctcaacagatacaaaatcaaactcaatgtcttccccaagtatagtcttcttggtggcccagtgtaagcagagggcaccaccacctgctccctcgcccaggctaagaacctgggcatccttctttttcctcaccccgtccaacaaactggtcacagtgttctgccaattctctctccatgcaatcctatcatgctatcctaactgcaattcacaaacccaaccccaactttcactccaaacttgatccaagcaatgtgctggatcccaactgtaaccttgcaaactcaactctgcccttcactttgaccgtgactatccttaattgcagcaggaaactgatcattatgctcccctcaatccacacattgcctctgagtacagccatggtttgtccacgatttgctcaaagacactgcccatgtcctgtgccagggtctgtgacaatccctgacctcctgggacatggctccttagagagaggagagcctttctcacagcttgggactttgagtctgtgtctttttttttttcttgagacggagttttgctgtggttgcccaggctggagtgcagtgatctcggctcactgaaacctccgcctcccgggttcaaacgattctcctgcctcagcctcccaagtagctgggattacaggcacccaccaccatgcccagctaatttttttgtatttttagtagagatggggtttcaccatgttggccaggctggtctcgaactcctgacctcaggtgatccacccgcctttgcctcccaaagtgctgggattacaggcgtcaaccaccgcgcccggccgagtctgtgtcttgcctctgtgcctcagacttgcggttccttgagatctcaggattgggacgtaagatgccagcctggggtcctcgtctcatagccccttccccctagtactatggcactggctgctgaggactggtggctggaaggtctcagctgtgactttggcttatctgatcttctgcctgtgttcccttgtgggcattcttcatcttcaaagaggtgagtcatgtccccagtgggtctgtccaaaccctactccatcttccccaggataagccggctctggccagtctgacaaccatctttctttcctcccatccctcccttcaagaccccagaatcctgttctccccagtcttcctctagcctccctcaaacttcccaagcctcttgcaattttttttttttttttgagacagggtctcattctgtcaccccagctggagtgcagtggcacaatctgagctcactgtaacctctgcctcccaggcttaagtgattcttgtgcttcagcctcccgagtacctgggactacaagtgtatgccaccacacccggccaattttttatatttttagtagagacgaggtttcaccatgttggccagactggtctcgaactcttgacctcaaatgatccgcccacctcggcctcccaaagtgctgggattacaggcacgagccaccgcgcccgtccgcctcgcaatttgaactcctgtctcctttgttgaaccaagtgacctccccagcacctggccccacaaatcctcaccctgccaagcagcccctcctctgatcacgccctttaactcccaccagccctggtcctgaggaggaaaagaaagcgaatgactgaccccaccaggaggtaatgcaaccagtgcaccccgcggtaacaccctccaccttcactttatgccttgcacttactgtttcctctgcccaggggttctttgctccgtctctactgtttcaaatactgcccaacctcaaagcccagctccaaagctacctcctctgtgaagaactccttggaaatgatcatctcagactcctctattggctgtcccagcacaagtgatcacgtttaacttctgaaggcctggacagaatcttgagtgggtccgccattccattccaagtcggccctcaccgtgcacttcctcttctcccgccagattcttcaaagtgacgcctcccccaggaagcgggccccagaaccagtacgggaacgtgctgtctctccccacacccacctcaggcctcggtaagaggcaccgcccctccagcctatagctccgccccagatccggggctccacccccactctcctcatccctccaatccgctgtgcgccaagccttctggagctcggaactccgcccccggggcggggagtcccgcccagctatgagccccgcctctagaaccagaccccgcctccagggctcagagccacgcccccaggacccagagcctgaagtcgtaatcaagagcagaacttcgccccagaactgaaggcctcggccctagatttagattccgccccagggttcaaggccgggttcctagacccagagtccattcgcagagcccaaaacatcctcttcccgtgccccgccgcgcggacccttagccttgaccgcccccatctcttctgaccccgtcttacaatgcccctctcaccaggacgcgcccagcgttgggccgcaggcctggggggcactgccccgtcttatggaaacccgagcagcgacgtccaggcggatggagccttggggtcccggagcccgccgggagtgggtgaatgactgggagagggaagggtcgttccccacatggagggggttggagcggtctgtggcccgaatagtggactgggccctggaggagagggggcatgactcggttccccatccccatccccaaacccccaggcccagaagaagaggaaggggagggctatgaggaacctgacagtgaggaggactccgagttctatgagaacgactccaaccttgggcaggaccagctctcccagggtaaggctgccctcccccgtggccccccacctctgcggtggcctgtggactcccatggacacccctccttctacaccagatggcagcggctacgagaaccctgaggatgagcccctgggtcctgaggatgaagactccttctccaacggtaacttggggcctttgtgggacctcagagacttaggtgtaattgcagcgctgtgacactcctagaaggggatccctggagttctctctcttctgccacagctgagtcttatgagaacgaggatgaagagctgacccagccggtcgccaggacaatgggtgtgtgtgaggatggcaacagtccaggggggaggcggaggacacctggaggccaggaggaatagtaacctccctcttccctttccagacttcctgagccctcatgggtcagcctgggaccccagccgggaagcaacctccctgggtgagagatgctttcaatcagactgccttgcccagcttgggtgacctggcctcagctctgacaccagatccaactttgacctgaccctgaccccaaacccgaacccaatcctgtgactcctctcacctcaacactgagccccatcccccatcctgagccccatcccccatcctgacccccaatatttaccccctccctaactgtgaatatcaacaccgatcccaatgcagtatcagcctggacttgatctccacctcacctcagccccagtgcagacctcaacttggaccccagcttactctgcagcttcttcatgactctgactccgactccctccagtttcttctttttctttttcttttttttgagacggagtctccctctgttgcccaggctggagtgcagttgccacctctgcctcctaggttcaagcgattctcatgcctcagcctcctgagtagctgggattatagacgtttgccaccacacctggctaatttttgtattttcagtagagacagggtttcgccatgttggccagactggtctccaactcctggcctctagtgatctgcccgcctttggcttcccaaagtgctgggattacaggcatgagccaccacgcccagcccagttctgttcttgaccccttccttagccataatctaacccatatctaaccctgaccctacagctaactggggccccaaactcaatgctaaccaaatcaccccttcccagcacagcatgggtaatgctcctcaccttcctctgcccctcagtcttcctccttaccgtaggctgtacttcccatgccctagcctccaattctccatcccccgcccaagcagggtcccagtcctatgaggatatgagaggaatcctgtatgcagccccccagctccgctccattcggggccagcctggacccaatcatgaggaaggtgggtgcttctgccgctgtcccctgctgtcccctgggctgactttgccttccagcctacttccagtgccacccatgttctcctcctccctggtcctatccagatgcagactcttatgagaacatggataatcccgatgggccagacccagcctggggaggagggggccgcatgggcacctggagcaccaggtgatcctcaggtggccaggtgagctgggactgcccctagggaaagcggggagggagggagataggcacggatggcagtggctgctggctttcagggagggagagggaacagggttcctagggcctggtgggcagggggaggactgctggacccctccccatcaccgtttcttctgcatagcctggatctcctcaagtccccaagattcacacctgactctgaaatctgaagacctcgagcagatgatgccaacctctggagcaatgttgcttaggatgtgtgcatgtgtgtaagtgtgtgtgtgtgtgtgtgtgtgtatacatgccagtgacacttccagtcccctttgtattccttaaataaactcaatgagctc

SEQ ID NO: 124 - protein, 359 aa, Homo sapiens
MAEAITYADLRFVKAPLKKSISSRLGQDPGADDDGEITYENVQVPAVLGVPSSLASSVLGDKAAVKSEQPTASWRAVTSPAVGRILPCRTTCLRYLLLGLLLTCLLLGVTAICLGVRYLQVSQQLQQTNRVLEVTNSSLRQQLRLKITQLGQSAEDLQGSRRELAQSQEALQVEQRAHQAAEGQLQACQADRQKTKETLQSEEQQRRALEQKLSNMENRLKPFFTCGSADTCCPSGWIMHQKSCFYISLTSKNWQESQKQCETLSSKLATFSEIYPQSHSYYFLNSLLPNGGSGNSYWTGLSSNKDWKLTDDTQRTRTYAQSSKCNKVHKTWSWWTLESESCRSSLPYICEMTAFRFPD

SEQ ID NO: 125 - DNA, 1548 bp, Homo sapiens
aattgctaagccgtgcagtcacagagggaacacagagcctagttgtaaacggacagagacgagaggggcaagggaggacagtggatgacagggaagacgagtgggggcagagctgctcaggaccatggctgaggccatcacctatgcagatctgaggtttgtgaaggctcccctgaagaagagcatctccagccggttaggacaggacccaggggctgatgatgatggggaaatcacctacgagaatgttcaagtgcccgcagtcctaggggtgccctcaagcttggcttcttctgtactaggggacaaagcagcggtcaagtcggagcagccaactgcgtcctggagagccgtgacgtcaccagctgtcgggcggattctcccctgccgcacaacctgcctgcgatacctcctgctcggcctgctcctcacctgcctgctgttaggagtgaccgccatctgcctgggagtgcgctatctgcaggtgtctcagcagctccagcagacgaacagggttctggaagtcactaacagcagcctgaggcagcagctccgcctcaagataacgcagctgggacagagtgcagaggatctgcaggggtccaggagagagctggcgcagagtcaggaagcactacaggtggaacagagggctcatcaggcggccgaagggcagctacaggcctgccaggcagacagacagaagacgaaggagaccttgcaaagtgaggagcaacagaggagggccttggagcagaagctgagcaacatggagaacagactgaagcccttcttcacatgcggctcagcagacacctgctgtccgtcgggatggataatgcatcagaaaagctgcttttacatctcacttacttcaaaaaattggcaggagagccaaaaacaatgtgaaactctgtcttccaagctggccacattcagtgaaatttatccacaatcacactcttactacttcttaaattcactgttgccaaatggtggttcagggaattcatattggactggcctcagctctaacaaggattggaagttgactgatgatacacaacgcactaggacttatgctcaaagctcaaaatgtaacaaggtacataaaacttggtcatggtggacactggagtcagagtcatgtagaagttctcttccctacatctgtgagatgacagctttcaggtttccagattaggacagtcctttgcactgagttgacactcatgccaacaagaacctgtgcccctccttcctaacctgaggcctggggttcctcagaccatctccttcattctgggcagtgcccagccaccggctgacccacacctgacacttccagccagtctgctgcctgctccctcttcctgaaactggactgttcctgggaaaagggtgaagccacctctagaagggactttggcctccccccaagaacttcccatggtagaatggggtgggggaggagggcgcacgggctgagcggataggggcggcccggagccagccaggcagttttattgaaatctttttaaataattg

SEQ ID NO: 126 - protein, 429 aa, Homo sapiens
MLPRLLLLICAPLCEPAELFLIASPSHPTEGSPVTLTCKMPFLQSSDAQFQFCFFRDTRALGPGWSSSPKLQIAAMWKEDTGSYWCEAQTMASKVLRSRRSQINVHRVPVADVSLETQPPGGQVMEGDRLVLICSVAMGTGDITFLWYKGAVGLNLQSKTQRSLTAEYEIPSVRESDAEQYYCVAENGYGPSPSGLVSITVRIPVSRPILMLRAPRAQAAVEDVLELHCEALRGSPPILYWFYHEDITLGSRSAPSGGGASFNLSLTEEHSGNYSCEANNGLGAQRSEAVTLNFTVPTGARSNHLTSGVIEGLLSTLGPATVALLFCYGLKRKIGRRSARDPLRSLPSPLPQEFTYLNSPTPGQLQPIYENVNVVSGDEVYSLAYYNQPEQESVAAETLGTHMEDKVSLDIYSRLRKANITDVDYEDAM

SEQ ID NO: 127 - DNA, 3116 bp, Homo sapiens
aacttccgatatcaacttcctcaaacctctgatgagctgctgctgctcgactctgaggtgcattctttttttgatgagaggcatctctaggtaccatccctgacctggtcctcatgctgccgaggctgttgctgttgatctgtgctccactctgtgaacctgccgagctgtttttgatagccagcccctcccatcccacagaggggagcccagtgaccctgacgtgtaagatgccctttctacagagttcagatgcccagttccagttctgctttttcagagacacccgggccttgggcccaggctggagcagctcccccaagctccagatcgctgccatgtggaaagaagacacagggtcatactggtgcgaggcacagacaatggcgtccaaagtcttgaggagcaggagatcccagataaatgtgcacagggtccctgtcgctgatgtgagcttggagactcagcccccaggaggacaggtgatggagggagacaggctggtcctcatctgctcagttgctatgggcacaggagacatcaccttcctttggtacaaaggggctgtaggtttaaaccttcagtcaaagacccagcgttcactgacagcagagtatgagattccttcagtgagggagagtgatgctgagcaatattactgtgtagctgaaaatggctatggtcccagccccagtgggctggtgagcatcactgtcagaatcccggtgtctcgcccaatcctcatgctcagggctcccagggcccaggctgcagtggaggatgtgctggagcttcactgtgaggccctgagaggctctcctccgatcctgtactggttttatcacgaggatatcaccctggggagcaggtcggccccctctggaggaggagcctccttcaacctttccctgactgaagaacattctggaaactactcctgtgaggccaacaatggcctgggggcccagcgcagtgaggcggtgacactcaacttcacagtgcctactggggccagaagcaatcatcttacctcaggagtcattgaggggctgctcagcacccttggtccagccaccgtggccttattattttgctacggcctcaaaagaaaaataggaagacgttcagccagggatccactcaggagccttcccagccctctaccccaagagttcacctacctcaactcacctaccccagggcagctacagcctatatatgaaaatgtgaatgttgtaagtggggatgaggtttattcactggcgtactataaccagccggagcaggaatcagtagcagcagaaaccctggggacacatatggaggacaaggtttccttagacatctattccaggctgaggaaagcaaacattacagatgtggactatgaagatgctatgtaaggttatggaagattctgctctttgaaaaccatccatgaccccaagcctcaggcctgatatgttcttcagagatcctggggcattagctttccagtatacctcttctggatgccattctccatggcactattccttcatctactgtgaagtgaagttggcgcagccctgaagaaactacctaggagaactaatagacacaggagtgacagggactttgttatcagaaccagattcctgccggctcctttgaaaacaggtcatattgtgctcttctgtttacaagaggaaacaagatggaataaaagaaattgggatcttgggttggagggacagtgaagcttagagcacatgaactcaaggttagtgactctgcaggacttcacagagagagctgtgcccatcattcagtccaagtgctttctctgcccagacagcacagaactccagccccgctacttacatggatcatcgagtttccacctaaaatatgattctatttattttgagtcactgttaccaaattagaactaaaacaaagttacataaaaagttattgtgactccacttaattttagtgacgtatttttgtatatataggccaacctataccacatccaaaattatgtatctattacagcccctagaagctttataaatacagtgtgtcttcttttattcacaaaatttttgaaatcgtggtaatatggtttgaaacctgtatcttaattattttttttttaaattgagacagggtctcactctgtcactcaatctggaatgcagtggcacaatcttgcctcactgcaacgcctgcctctcaggctcaagcaaacctctcacctcagcctgctgagtagctgggactacaggcacatgccaccaaacttggccattttttgtcttacgtagagacaagatttcaccgttttgcccaggctggtctcaaactcctgggctcaagcaatgtattgaattttaaaataaccaggcactcactcttatgaattaataaacatttggaggtatataaagtaaaaagttaaagtctttcctgtaagttaacacaaatgttaactattgttaaaaactttacaggtagctctctagatatttttctatttttgtatgtatacttatgcatacatgtaagtatataaacatttagaagtgtacctatctaacaaactattatgaaatactttcaaatctgtaaatagatctattatactattttaaaagtctctatagtagtgtgttatatagataaatcataacttttttctttttttattgtagtaaatatgcacaacataaaattgatcattttaaccatttttaagtgtacaattcagtggcattaagtactatcataatatattttaatccttctcatcactggtggacattaaggagactctcaaaaaattcatattataaaaacaaagttcaaacaaatgtctttgtactagcatattatggcactcctgctggattatctgaaggataaatttgtaaatctagtattgctagattatgcatattaaatattcttgttaaatagtcttcaatgtctctcaggtaaggctgtatcaatttatatcttcaccaacaacgtctgggaaatcagtttgtggggtgtattacttagttttcacattgctaataaagacatatccaagactgggtaatttataaaaaaaaaaaaaaaaaaaa

SEQ ID NO: 128 - protein, 297 aa, Homo sapiens
MTTPRNSVNGTFPAEPMKGPIAMQSGPKPLFRRMSSLVGPTQSFFMRESKTLGAVQIMNGLFHIALGGLLMIPAGIYAPICVTVWYPLWGGIMYIISGSLLAATEKNSRKCLVKGKMIMNSLSLFAAISGMILSIMDILNIKISHFLKMESLNFIRAHTPYINIYNCEPANPSEKNSPSTQYCYSIQSLFLGILSVMLIFAFFQELVIAGIVENEWKRTCSRPKSNIVLLSAEEKKEQTIEIKEEVVGLTETSSQPKNEEDIEIIPIQEEEEEETETNFPEPPQDQESSPIENDSSP

SEQ ID NO: 129 - DNA, 3594 bp, Homo sapiens
gtctatcagcgatttcatcttcaggcctggactacaccactcaccctcccagtgtgcttgagaaacaaactgcacccactgaactccgcagctagcatccaaatcagcccttgagatttgaggccttggagactcagatcctgaacaagagagaacaaaatctctactttgatggaacttccattctgtggggaagagactgacaataagcaattaaataaataagaactcagcagtaggccttgcctcagatccaaggtcactcggaagaggccatgtctaccctcaatgacactcatggaggaaatgctgagagaagcattcagatgcatgacacaaggtaagactgccaaaaatcttgttcttgctctcctcattttgttatttgttttatttttaggagttttgagagcaaaatgacaacacccagaaattcagtaaatgggactttcccggcagagccaatgaaaggccctattgctatgcaatctggtccaaaaccactcttcaggaggatgtcttcactggtgggccccacgcaaagcttcttcatgagggaatctaagactttgggggctgtccagattatgaatgggctcttccacattgccctggggggtcttctgatgatcccagcagggatctatgcacccatctgtgtgactgtgtggtaccctctctggggaggcattatgtatattatttccggatcactcctggcagcaacggagaaaaactccaggaagtgtttggtcaaaggaaaaatgataatgaattcattgagcctctttgctgccatttctggaatgattctttcaatcatggacatacttaatattaaaatttcccattttttaaaaatggagagtctgaattttattagagctcacacaccatatattaacatatacaactgtgaaccagctaatccctctgagaaaaactccccatctacccaatactgttacagcatacaatctctgttcttgggcattttgtcagtgatgctgatctttgccttcttccaggaacttgtaatagctggcatcgttgagaatgaatggaaaagaacgtgctccagacccaaatctaacatagttctcctgtcagcagaagaaaaaaaagaacagactattgaaataaaagaagaagtggttgggctaactgaaacatcttcccaaccaaagaatgaagaagacattgaaattattccaatccaagaagaggaagaagaagaaacagagacgaactttccagaacctccccaagatcaggaatcctcaccaatagaaaatgacagctctccttaagtgatttcttctgttttctgtttccttttttaaacattagtgttcatagcttccaagagacatgctgactttcatttcttgaggtactctgcacatacgcaccacatctctatctggcctttgcatggagtgaccatagctccttctctcttacattgaatgtagagaatgtagccattgtagcagcttgtgttgtcacgcttcttcttttgagcaactttcttacactgaagaaaggcagaatgagtgcttcagaatgtgatttcctactaacctgttccttggataggctttttagtatagtatttttttttgtcattttctccatcaacaaccagggagactgcacctgatggaaaagatatatgactgcttcatgacattcctaaactatcttttttttattccacatctacgtttttggtggagtcccttttgcatcattgttttaaggatgataaaaaaaaataacaactagggacaatacagaacccattccatttatctttctacagggctgacattgtggcacattcttagagttaccacaccccatgagggaagctctaaatagccaacacccatctgttttttgtaaaaacagcatagcttatacatggacatgtctctgccttaacttttcctaactcccactctaggctattgtttgcatgtctacctacttttagccattatgcgagaaaagaaaaaaatgaccatagaaaatgccaccatgaggtgcccaaatttcaaataataattaacatttagttatatttataatttccagatgacaaagtatttcatcaaataacttcatttgatgttccatgatcaagaaagaatccctatctctattttacaagtaattcaaagaggccaaataacttgtaaacaagaaaaggtaacttgtcaacagtcataactagtaattatgagagccttgtttcataaccaggtcttcttactcaaatcctgtgatgtttgaaataaccaaattgtctctccaatgtctgcataaactgtgagagccaagtcaacagcttttatcaagaatttactctctgaccagcaataaacaagcactgagagacacagagagccagattcagattttacccatggggataaaaagactcagactttcaccacatttggaaaactacttgcatcataaatatataataactggtagtttatatgaagcagacactaagtgctatagacactctcagaatatcatacttggaaacaatgtaattaaaatgccgaatctgagtcaacagctgccctacttttcaattcagatatactagtaccttacctagaaataatgttaacctagggtgaagtcactataatctgtagtctattatttgggcatttgctacatgatgagtgctgccagattgtggcaggtaaagagacaatgtaatttgcactccctatgatatttctacatttttagcgaccactagtggaagacattccccaaaattagaaaaaaaggagatagaagatttctgtctatgtaaagttctcaaaatttgttctaaattaataaaactatctttgtgttcttttctgcaacagatgattccaacatgggtgtttgtctattcttctttactcttgaaacattagaccatgggaggctcttacagccttgagttgatatttatacaacccaaatctaggtttgaacggtgaggtgtcaggtcatcaaatattcatgtctatatagtcttacacaggttctcaaaaaaaatgttcatgggataggtcattgataatggattccttattctgagaactccagacgactgaaatatatgagagaaggaaaaggacatagtaggagcaggcctgagaaaaaaatgaaagtcagaaatctttaaaaaaatacaagatcttatttctatcttattttttctcctcttctgaaatatatatgaggattcctctccaaacccatggtttctctaagaattttgagtcatttgtatgacctcaaataattagttttagctgacctcacataactccttataataggagacatctttaatgtctgctattaaagaaggatgaaaattcctatgaccttctccccgattatccctttggcaatatagagtcaaataataacattgaccaatagtaaacatgctttgccaagaagtagaagatatattctctagccttagtttttcctcccaatttgcatttttgtaaaaataatgttgtatccacaaaggaaataaactttaaaaacccaagtgca

SEQ ID NO: 130 - protein, 223 aa, Homo sapiens
MACLGFQRHKAQLNLATRTWPCTLLFFLLFIPVFCKAMHVAQPAVVLASSRGIASFVCEYASPGKATEVRVTVLRQADSQVTEVCAATYMMGNELTFLDDSICTGTSSGNQVNLTIQGLRAMDTGLYICKVELMYPPPYYLGIGNGTQIYVIDPEPCPDSDFLLWILAAVSSGLFFYSFLLTAVSLSKMLKKRSPLTTGVYVKMPPTEPECEKQFQPYFIPIN

SEQ ID NO: 131 - DNA, 2025 bp, Homo sapiens
cttctgtgtgtgcacatgtgtaatacatatctgggatcaaagctatctatataaagtccttgattctgtgtgggttcaaacacatttcaaagcttcaggatcctgaaaggttttgctctacttcctgaagacctgaacaccgctcccataaagccatggcttgccttggatttcagcggcacaaggctcagctgaacctggctaccaggacctggccctgcactctcctgttttttcttctcttcatccctgtcttctgcaaagcaatgcacgtggcccagcctgctgtggtactggccagcagccgaggcatcgccagctttgtgtgtgagtatgcatctccaggcaaagccactgaggtccgggtgacagtgcttcggcaggctgacagccaggtgactgaagtctgtgcggcaacctacatgatggggaatgagttgaccttcctagatgattccatctgcacgggcacctccagtggaaatcaagtgaacctcactatccaaggactgagggccatggacacgggactctacatctgcaaggtggagctcatgtacccaccgccatactacctgggcataggcaacggaacccagatttatgtaattgatccagaaccgtgcccagattctgacttcctcctctggatccttgcagcagttagttcggggttgtttttttatagctttctcctcacagctgtttctttgagcaaaatgctaaagaaaagaagccctcttacaacaggggtctatgtgaaaatgcccccaacagagccagaatgtgaaaagcaatttcagccttattttattcccatcaattgagaaaccattatgaagaagagagtccatatttcaatttccaagagctgaggcaattctaacttttttgctatccagctatttttatttgtttgtgcatttggggggaattcatctctctttaatataaagttggatgcggaacccaaattacgtgtactacaatttaaagcaaaggagtagaaagacagagctgggatgtttctgtcacatcagctccactttcagtgaaagcatcacttgggattaatatggggatgcagcattatgatgtgggtcaaggaattaagttagggaatggcacagcccaaagaaggaaaaggcagggagcgagggagaagactatattgtacacaccttatatttacgtatgagacgtttatagccgaaatgatcttttcaagttaaattttatgccttttatttcttaaacaaatgtatgattacatcaaggcttcaaaaatactcacatggctatgttttagccagtgatgctaaaggttgtattgcatatatacatatatatatatatatatatatatatatatatatatatatatatatattttaatttgatagtattgtgcatagagccacgtatgtttttgtgtatttgttaatggtttgaatataaacactatatggcagtgtctttccaccttgggtcccagggaagttttgtggaggagctcaggacactaatacaccaggtagaacacaaggtcatttgctaactagcttggaaactggatgaggtcatagcagtgcttgattgcgtggaattgtgctgagttggtgttgacatgtgctttggggcttttacaccagttcctttcaatggtttgcaaggaagccacagctggtggtatctgagttgacttgacagaacactgtcttgaagacaatggcttactccaggagacccacaggtatgaccttctaggaagctccagttcgatgggcccaattcttacaaacatgtggttaatgccatggacagaagaaggcagcaggtggcagaatggggtgcatgaaggtttctgaaaattaacactgcttgtgtttttaactcaatattttccatgaaaatgcaacaacatgtataatatttttaattaaataaaaatctgtggtggtcgttttaaaaaaaaaaaaaaaaaaaaaaaaaaaaaaaaaaaaaaaaaaaaaaaaaaaaaaaaaa

SEQ ID NO: 132 - protein, 360 aa, Homo sapiens
MWEAQFLGLLFLQPLWVAPVKPLQPGAEVPVVWAQEGAPAQLPCSPTIPLQDLSLLRRAGVTWQHQPDSGPPAAAPGHPLAPGPHPAAPSSWGPRPRRYTVLSVGPGGLRSGRLPLQPRVQLDERGRQRGDFSLWLRPARRADAGEYRAAVHLRDRALSCRLRLRLGQASMTASPPGSLRASDWVILNCSFSRPDRPASVHWFRNRGQGRVPVRESPHHHLAESFLFLPQVSPMDSGPWGCILTYRDGFNVSIMYNLTVLGLEPPTPLTVYAGAGSRVGLPCRLPAGVGTRSFLTAKWTPPGGGPDLLVTGDNGDFTLRLEDVSQAQAGTYTCHIHLQEQQLNATVTLAIITGQPQVGKE

SEQ ID NO: 133 - DNA, 1995 bp, Homo sapiens
acaggggtgaaggcccagagaccagcagaacggcatcccagccacgacggccactttgctctgtctgctctccgccacggccctgctctgttccctgggacacccccgcccccacctcctcaggctgcctgatctgcccagctttccagctttcctctggattccggcctctggtcatccctccccaccctctctccaaggccctctcctggtctcccttcttctagaaccccttcctccacctccctctctgcagaacttctcctttaccccccaccccccaccactgccccctttccttttctgacctccttttggagggctcagcgctgcccagaccataggagagatgtgggaggctcagttcctgggcttgctgtttctgcagccgctttgggtggctccagtgaagcctctccagccaggggctgaggtcccggtggtgtgggcccaggagggggctcctgcccagctcccctgcagccccacaatccccctccaggatctcagccttctgcgaagagcaggggtcacttggcagcatcagccagacagtggcccgcccgctgccgcccccggccatcccctggcccccggccctcacccggcggcgccctcctcctgggggcccaggccccgccgctacacggtgctgagcgtgggtcccggaggcctgcgcagcgggaggctgcccctgcagccccgcgtccagctggatgagcgcggccggcagcgcggggacttctcgctatggctgcgcccagcccggcgcgcggacgccggcgagtaccgcgccgcggtgcacctcagggaccgcgccctctcctgccgcctccgtctgcgcctgggccaggcctcgatgactgccagccccccaggatctctcagagcctccgactgggtcattttgaactgctccttcagccgccctgaccgcccagcctctgtgcattggttccggaaccggggccagggccgagtccctgtccgggagtccccccatcaccacttagcggaaagcttcctcttcctgccccaagtcagccccatggactctgggccctggggctgcatcctcacctacagagatggcttcaacgtctccatcatgtataacctcactgttctgggtctggagcccccaactcccttgacagtgtacgctggagcaggttccagggtggggctgccctgccgcctgcctgctggtgtggggacccggtctttcctcactgccaagtggactcctcctgggggaggccctgacctcctggtgactggagacaatggcgactttacccttcgactagaggatgtgagccaggcccaggctgggacctacacctgccatatccatctgcaggaacagcagctcaatgccactgtcacattggcaatcatcacagtgactcccaaatcctttgggtcacctggatccctggggaagctgctttgtgaggtgactccagtatctggacaagaacgctttgtgtggagctctctggacaccccatcccagaggagtttctcaggaccttggctggaggcacaggaggcccagctcctttcccagccttggcaatgccagctgtaccagggggagaggcttcttggagcagcagtgtacttcacagagctgtctagcccaggtgcccaacgctctgggagagccccaggtgccctcccagcaggccacctcctgctgtttctcatccttggtgtcctttctctgctccttttggtgactggagcctttggctttcacctttggagaagacagtggcgaccaagacgattttctgccttagagcaagggattcaccctccgcaggctcagagcaagatagaggagctggagcaagaaccggagccggagccggagccggaaccggagcccgagcccgagcccgagccggagcagctctgacctggagctgaggcagccagcagatctcagcagcccagtccaaataaactccctgtcagcagcaaaaa

SEQ ID NO: 134 - protein, 429 aa, Homo sapiens; identical to SEQ ID NO: 126

SEQ ID NO: 135 - DNA, 3116 bp, Homo sapiens; identical to SEQ ID NO: 127

SEQ ID NO: 136 - protein, 742 aa, Homo sapiens
MLLWLLLLILTPGREQSGVAPKAVLLLNPPWSTAFKGEKVALICSSISHSLAQGDTYWYHDEKLLKIKHDKIQITEPGNYQCKTRGSSLSDAVHVEFSPDWLILQALHPVFEGDNVILRCQGKDNKNTHQKVYYKDGKQLPNSYNLEKITVNSVSRDNSKYHCTAYRKFYILDIEVTSKPLNIQVQELFLHPVLRASSSTPIEGSPMTLTCETQLSPQRPDVQLQFSLFRDSQTLGLGWSRSPRLQIPAMWTEDSGSYWCEVETVTHSIKKRSLRSQIRVQRVPVSNVNLEIRPTGGQLIEGENMVLICSVAQGSGTVTFSWHKEGRVRSLGRKTQRSLLAELHVLTVKESDAGRYYCAADNVHSPILSTWIRVTVRIPVSHPVLTFRAPRAHTVVGDLLELHCESLRGSPPILYRFYHEDVTLGNSSAPSGGGASFNLSLTAEHSGNYSCDADNGLGAQHSHGVSLRVTVPVSRPVLTLRAPGAQAVVGDLLELHCESLRGSFPILYWFYHEDDTLGNISAHSGGGASFNLSLTTEHSGNYSCEADNGLGAQHSKVVTLNVTGTSRNRTGLTAAGITGLVLSILVLAAAAALLHYARARRKPGGLSATGTSSHSPSECQEPSSSRPSRIDPQEPTHSKPLAPMELEPMYSNVNPGDSNPIYSQIWSIQHTKENSANCPMMHQEHEELTVLYSELKKTHPDDSAGEASSRGRAHEEDDEENYENILNPRKNKVQDFPCLCNT

SEQ ID NO: 137 - DNA, 3019 bp, Homo sapiens
agtgaaggggtttcccatatgaaaaatacagaaagaattatttgaatactagcaaatacacaacttgatatttctagagaacccaggcacagtcttggagacattactcctgagagactgcagctgatggaagatgagccccaacttctaaaaatgtatcactaccgggattgagatacaaacagcatttaggaaggtctcatctgagtagcagcttcctgccctccttcttggagataagtcgggcttttggtgagacagactttcccaaccctctgcccggccggtgcccatgcttctgtggctgctgctgctgatcctgactcctggaagagaacaatcaggggtggccccaaaagctgtacttctcctcaatcctccatggtccacagccttcaaaggagaaaaagtggctctcatatgcagcagcatatcacattccctagcccagggagacacatattggtatcacgatgagaagttgttgaaaataaaacatgacaagatccaaattacagagcctggaaattaccaatgtaagacccgaggatcctccctcagtgatgccgtgcatgtggaattttcacctgactggctgatcctgcaggctttacatcctgtctttgaaggagacaatgtcattctgagatgtcaggggaaagacaacaaaaacactcatcaaaaggtttactacaaggatggaaaacagcttcctaatagttataatttagagaagatcacagtgaattcagtctccagggataatagcaaatatcattgtactgcttataggaagttttacatacttgacattgaagtaacttcaaaacccctaaatatccaagttcaagagctgtttctacatcctgtgctgagagccagctcttccacgcccatagaggggagtcccatgaccctgacctgtgagacccagctctctccacagaggccagatgtccagctgcaattctccctcttcagagatagccagaccctcggattgggctggagcaggtcccccagactccagatccctgccatgtggactgaagactcagggtcttactggtgtgaggtggagacagtgactcacagcatcaaaaaaaggagcctgagatctcagatacgtgtacagagagtccctgtgtctaatgtgaatctagagatccggcccaccggagggcagctgattgaaggagaaaatatggtccttatttgctcagtagcccagggttcagggactgtcacattctcctggcacaaagaaggaagagtaagaagcctgggtagaaagacccagcgttccctgttggcagagctgcatgttctcaccgtgaaggagagtgatgcagggagatactactgtgcagctgataacgttcacagccccatcctcagcacgtggattcgagtcaccgtgagaattccggtatctcaccctgtcctcaccttcagggctcccagggcccacactgtggtgggggacctgctggagcttcactgtgagtccctgagaggctctcccccgatcctgtaccgattttatcatgaggatgtcaccctggggaacagctcagccccctctggaggaggagcctccttcaacctctctctgactgcagaacattctggaaactactcctgtgatgcagacaatggcctgggggcccagcacagtcatggagtgagtctcagggtcacagttccggtgtctcgccccgtcctcaccctcagggctcccggggcccaggctgtggtgggggacctgctggagcttcactgtgagtccctgagaggctccttcccgatcctgtactggttttatcacgaggatgacaccttggggaacatctcggcccactctggaggaggggcatccttcaacctctctctgactacagaacattctggaaactactcatgtgaggctgacaatggcctgggggcccagcacagtaaagtggtgacactcaatgttacaggaacttccaggaacagaacaggccttaccgctgcgggaatcacggggctggtgctcagcatcctcgtccttgctgctgctgctgctctgctgcattacgccagggcccgaaggaaaccaggaggactttctgccactggaacatctagtcacagtcctagtgagtgtcaggagccttcctcgtccaggccttccaggatagaccctcaagagcccactcactctaaaccactagccccaatggagctggagccaatgtacagcaatgtaaatcctggagatagcaacccgatttattcccagatctggagcatccagcatacaaaagaaaactcagctaattgtccaatgatgcatcaagagcatgaggaacttacagtcctctattcagaactgaagaagacacacccagacgactctgcaggggaggctagcagcagaggcagggcccatgaagaagatgatgaagaaaactatgagaatgtaccacgtgtattactggcctcagaccactagccccttacccagagtggcccacaggaaacagcctgcaccatttttttttctgttctctccaaccacacatcatccatctctccagactctgcctcctacgaggctgggctgcagggtatgtgaggctgagcaaaaggtctgcaaatctcccctgtgcctgatctgtgtgttccccaggaagagagcaggcagcctctgagcaagcactgtgttattttcacagtggagacacgtggcaaggcaggagggccctcagctcctagggctgtcgaatagaggaggagagagaaatggtctagccagggttacaagggcacaatcatgaccatttgatccaagtgtgatcgaaagctgttaatgtgctctctgtataaacaatttgctccaaatattttgtttcccttttttgtgtggctggtagtggcattgctgatgttttggtgtatatgctgtatccttgctaccatattgggaacagccaaaagaagttatagaacaagaatttaaggtgactctatctga

SEQ ID NO: 138 - protein, 499 aa, Homo sapiens
MLLLLLLLPLLWGTKGMEGDRQYGDGYLLQVQELVTVQEGLCVHVPCSFSYPQDGWTDSDPVHGYWFRAGDRPYQDAPVATNNPDREVQAETQGRFQLLGDIWSNDCSLSIRDARKRDKGSYFFRLERGSMKWSYKSQLNYKTKQLSVFVTALTHRPDILILGTLESGHSRNLTCSVPWACKQGTPPMISWIGASVSSPGPTTARSSVLTLTPKPQDHGTSLTCQVTLPGTGVTTTSTVRLDVSYPPWNLTMTVFQGDATASTALGNGSSLSVLEGQSLRLVCAVNSNPPARLSWTRGSLTLCPSRSSNPGLLELPRVHVRDEGEFTCRAQNAQGSQHISLSLSLQNEGTGTSRPVSQVTLAAVGGAGATALAFLSFCIIFIIVRSCRKKSARPAAGVGDTGMEDAKAIRGSASQGPLTESWKDGNPLKKPPPAVAPSSGEEGELHYATLSFHKVKPQDPQGQEATDSEYSEIKIHKRETAETQACLRNHNPSSKEVRG

SEQ ID NO: 139 - DNA, 2967 bp, Homo sapiens
agtttctgagagaagaaccctgaggaacagacgttccctggcggccctggcgccttcaaacccagacatgctgctgctgctgctgctgctgcccctgctctgggggacaaaggggatggagggagacagacaatatggggatggttacttgctgcaagtgcaggagctggtgacggtgcaggagggcctgtgtgtccatgtgccctgctccttctcctacccccaggatggctggactgactctgacccagttcatggctactggttccgggcaggagacagaccataccaagacgctccagtggccacaaacaacccagacagagaagtgcaggcagagacccagggccgattccaactccttggggacatttggagcaacgactgctccctgagcatcagagacgccaggaagagggataaggggtcatatttctttcggctagagagaggaagcatgaaatggagttacaaatcacagttgaattacaaaactaagcagctgtctgtgtttgtgacagccctgacccataggcctgacatcctcatcctagggaccctagagtctggccactccaggaacctgacctgctctgtgccctgggcctgtaagcaggggacaccccccatgatctcctggattggggcctccgtgtcctccccgggccccactactgcccgctcctcagtgctcacccttaccccaaagccccaggaccacggcaccagcctcacctgtcaggtgaccttgcctgggacaggtgtgaccacgaccagtaccgtccgcctcgatgtgtcctaccctccttggaacttgaccatgactgtcttccaaggagatgccacagcatccacagccctgggaaatggctcatctctttcagtccttgagggccagtctctgcgcctggtctgtgctgtcaacagcaatccccctgccaggctgagctggacccgggggagcctgaccctgtgcccctcacggtcctcaaaccctgggctgctggagctgcctcgagtgcacgtgagggatgaaggggaattcacctgccgagctcagaacgctcagggctcccagcacatttccctgagcctctccctgcagaatgagggcacaggcacctcaagacctgtatcacaagtgacactggcagcagtcgggggagctggagccacagccctggccttcctgtccttctgcatcatcttcatcatagtgaggtcctgcaggaagaaatcggcaaggccagcagcgggcgtgggggatacaggcatggaagatgcaaaggccatcaggggctcggcctctcagggacccctgactgaatcctggaaagatggcaaccccctgaagaagcctcccccagctgttgccccctcgtcaggggaggaaggagagctccattatgcaaccctcagcttccataaagtgaagcctcaggacccgcagggacaggaggccactgacagtgaatactcggagatcaagatccacaagcgagaaactgcagagactcaggcctgtttgaggaatcacaacccctccagcaaagaagtcagaggctgattctcatagaacaagaaccctctagagccccatgctatgcagtaggtcaccagggctccctcctcctgtctaaccaaaacttggaccaatgtctcccctttccccggctaccagggacccatccctgcctctagcttctactacccaccattctcctctcgacctctctgaggttgactattttagattccacatagagatgaggtcatgtggtacttgcctctctgtgtgtggctcattttacacaaaaaaatatcccctaggttcatccatgttctctcaaatgacagaatcaagcactgaatatttttttttctttgagagatggagtttcgctctgttgcccaggctggagtgcagtggttcaatctctgctcactgcaacctccacctcctgggttcaaacgattctcctgcctcagcttcccaagtagctggtactacaggcgtgtgtcaccacgcccagctaatttttgtattttttagtagagacggggtttcactataagtgggccaggctagtctcaaactcctgacctcaagtgatctgcctgccttggcctcccaaagtgctgggatttcaggcatgagccaccgcacccagcttgcattgaatattttcaaggagctaaaagaagattttaaatggtctcacaaaaacagataaatatttgcacagatgggtgtgctaatcattgtgccttgatggttccacgatgtatccgggtgtggaaatctcactgggtctctctcaaggccactcggctactcaggacagggctggaatttaaagcctgtccgattctgaggtctcttctctcatctagcactgagtcaagcaatcagcaggctgggcaccccttagccataagttttcaggaaataaattccttgagggcattgacttttacaaaagagggagcagcaatggcctagagtctcaggaacaagacaggtgcactgaggagatgaaggccgggaccccctgcccaacctgtatggcgggtctgtacttattttgtttacccccaatttaaaacgtttttttttattgcaggttgtttgtttgatatggtttggctgtgtccccacccaaatcttatctagaattgtaatcagaattataatccccatgtgttgggggagggacctggtgggaggtgataggatcatgggggtggttcccccatgctgttctgatagtgagtgagttatcacgagatctgatggttttgtaagtggtggtttcccctgctcttctctcttgcctgccaccatgtaagatgtgcctggttccccttccgccatgattgtaagtttcctgaggcctcccccgccatgtggaactgtgagtcaattacacctctttcatttataaattaaaaaaaaaaaaaaaaaaa

SEQ ID NO: 140 - protein, 390 aa, Homo sapiens; identical to SEQ ID NO: 88

SEQ ID NO: 141 - DNA, 1968 bp, Homo sapiens
atttcctcatcgtcaagctttgttcctcgtgggggctagaaatctctttccagttccagattgtgaagggttcctgagtaagcagcgtgtctccatccccctctctaggggctcttggatggaccttgcactctagaagggacaatggacttctggctttggccactttacttcctgccagtatcgggggccctgaggatcctcccagaagtaaaggtagagggggagctgggcggatcagttaccatcaagtgcccacttcctgaaatgcatgtgaggatatatctgtgccgggagatggctggatctggaacatgtggtaccgtggtatccaccaccaacttcatcaaggcagaatacaagggccgagttactctgaagcaatacccacgcaagaatctgttcctagtggaggtaacacagctgacagaaagtgacagcggagtctatgcctgcggagcgggcatgaacacagaccggggaaagacccagaaagtcaccctgaatgtccacagtgaatacgagccatcatgggaagagcagccaatgcctgagactccaaaatggtttcatctgccctatttgttccagatgcctgcatatgccagttcttccaaattcgtaaccagagttaccacaccagctcaaaggggcaaggtccctccagttcaccactcctcccccaccacccaaatcacccaccgccctcgagtgtccagagcatcttcagtagcaggtgacaagccccgaaccttcctgccatccactacagcctcaaaaatctcagctctggaggggctgctcaagccccagacgcccagctacaaccaccacaccaggctgcacaggcagagagcactggactatggctcacagtctgggagggaaggccaaggatttcacatcctgatcccgaccatcctgggccttttcctgctggcacttctggggctggtggtgaaaagggccgttgaaaggaggaaagccctctccaggcgggcccgccgactggccgtgaggatgcgcgccctggagagctcccagaggccccgcgggtcgccgcgaccgcgctcccaaaacaacatctacagcgcctgcccgcggcgcgctcgtggagcggacgctgcaggcacaggggaggcccccgttcccggccccggagcgccgttgccccccgccccgctgcaggtgtctgaatctccctggctccatgccccatctctgaagaccagctgtgaatacgtgagcctctaccaccagcctgccgccatgatggaggacagtgattcagatgactacatcaatgttcctgcctgacaactccccagctatcccccaaccccaggctcggactgtggtgccaaggagtctcatctatctgctgatgtccaatacctgcttcatgtgttctcagagccctcatcacttcccatgccccatctcgactcccatccccatctatctgtgccctgagcatggctctgcccccaggtcgtcttgcacaccttggcagccccctgtagttgacaggtaagctgtaggcatgtagagcaattgtcccaatgccacttgcttcctttccaagccgtcgaacagactgtgggatttgcagagtgtttcttccatgtctttgaccacagggttgttgctgcccaggctctagatcacatggcatcaggctggggcagaggcatagctattgtctcgggcatccttcccagggttgggtcttacacaaatagaaggctcttgctctgagttatgtgacatgcctcagccccatggactaagcaggggtctggtataaaaacactcctggaaacgcctttgccctgatccaaatgttagcacttgctagtgaacgtctacttatctcaagttctatgctaaaggcaatttatcttgatgtgatgataaaccaaacttattagcaagatatgcatatatatcaaaaaaaaaaaaaaaaaa

SEQ ID NO: 142 - protein, 390 aa, Homo sapiens; identical to SEQ ID NO: 88

SEQ ID NO: 143 - DNA, 2026 bp, Homo sapiens
ttgcgcattggaggtcagaggacagcgagattctcgccctgagcaacggcctgacgtcggcggagggaagcaggcgcaggctccgtgaggaggcaagaatccgggctttgcccctgcaatcaacccacggaagctccgggaatggcggccaagcacgcggatcctgacgttcacatatctcagggagttgatgaccttgttttcagaaggtgactcaggtcaacacaggggcccccatctggtcgacagatgcagtggttctaggatctgccaagcatccaggtggagagcctgaggaatcaggagctccaggaaccaggcagtgaggccttggtctgagtcagtgtcctcaggtcacagagcagaggggacgcagacagtgccaacactgaaggttctgagggggacaggctgacaagtaggacccgaggcactggaggagcattgaaggagaagatctgcctgtgggtcttcattgcccagctcctgcccgcactcctgcctgctgccctgaccagagtcatcatgcctcttgagcagaggagtcagcactgcaagcctgaagaaggccttgaggcccgaggagaggccctgggcctggtgggtgcgcaggctcctgctactgaggagcagcagaccgcttcttcctcttctactctagtggaagttaccctgggggaggtgcctgctgccgactcaccgagtcctccccacagtcctcagggagcctccagcttctcgactaccatcaactacactctttggagacaatccgatgagggctccagcaaccaagaagaggaggggccaagaatgtttcccgacctggagtccgagttccaagcagcaatcagtaggaagatggttgagttggttcattttctgctcctcaagtatcgagccagggagccggtcacaaaggcagaaatgctggagagtgtcctcagaaattgccaggacttctttcccgtgatcttcagcaaagcctccgagtacttgcagctggtctttggcatcgaggtggtggaagtggtccccatcagccacttgtacatccttgtcacctgcctgggcctctcctacgatggcctgctgggcgacaatcaggtcatgcccaagacaggcctcctgataatcgtcctggccataatcgcaatagagggcgactgtgcccctgaggagaaaatctgggaggagctgagtatgttggaggtgtttgaggggagggaggacagtgtcttcgcacatcccaggaagctgctcatgcaagatctggtgcaggaaaactacctggagtaccggcaggtgcccggcagtgatcctgcatgctacgagttcctgtggggtccaagggccctcattgaaaccagctatgtgaaagtcctgcaccatacactaaagatcggtggagaacctcacatttcctacccacccctgcatgaacgggctttgagagagggagaagagtgagtctcagcacatgttgcagccagggccagtgggagggggtctgggccagtgcaccttccagggccccatccattagcttccactgcctcgtgtgatatgaggcccattcctgcctctttgaagagagcagtcagcattcttagcagtgagtttctgttctgttggatgactttgagatttatctttgtttcctgttggaattgttcaaatgttccttttaacaaatggttggatgaacttcagcatccaagtttatgaatgacagtagtcacacatagtgctgtttatatagtttaggggtaagagtcctgttttttattcagattgggaaatccattccattttgtgagttgtcacataataacagcagtggaatatgtatttgcctatattgtgaacgaattagcagtaaaatacatgatacaaggaactcaaaagatagttaattcttgccttatacctcagtctattatgtaaaattaaaaatatgtgtatgtttttgcttctttgagaatgcaaaagaaattaaatctgaataaataattcttcctgttca

SEQ ID NO: 144 - protein, 33 aa, Homo sapiens
MLLAAVGDDELTDSEDESDLFHEELEDFYDLDL

SEQ ID NO: 145 - DNA, 1827 bp, Homo sapiens
gacgtggagcaggcagggactgagcgggtgcctcagtgtcctacccctcccttcgccgggcctctcagtcctctcccagcagctggaccggaactatgtgatcccggaagttccggggccttttctgtgtgggataaacagtaatggcggaggctgcagctctcagaccaacagccacaacatcaggggcggcagtggcggcagcggcggcggcggcagcagcggcctcccctaccaggatccccacagtcaccattctgtccccagggggcaggcgagggggccgcggcagcgatggcagcggcggcagctggactaaacaggtcacctgcaggtattttatgcatggggtttataaggaaggagataactgttgcaagttgcatgacctctctgacagtccgtataatgtagtgtacaagagtttgcagccagggtactgtatttatggagactgctgcagatatgaacatagcaagccattgaaacagaaagaagcaactgctacagagctaactacaaagtcatcccttgctgcttcctcaagtctctcatggatagtcggaccacttgttgaaatgaatacgggtgaagctgagtcaagaaattcaaactttgtaactgtaggagcaggttcagagggctgggtgaatgctgttgagtttgttcctgggcaaccctactgtggccgcactgcgccttcctgcactgaagcacccctgcagggctcagtgaccaaggaagaatcagagaaagagcaaactgccgtggaaacaaagaagcagctgtgcccctatgctgcagtgggagagtgccgatatcgggagaacttgtgtgtatatggagattcgtgtgacatgtgtggctgcaggtcctgcatctgatggatgctgcccagagatcacagcatataaaatcatgctttgaggcccatgagaaagacagggagctctcatttgctgtgcagcgcagcgaggaaatggtgtgtgagagctgcatggagatgatctatgagaaagccaaccccagacagcaccgcttcgggatcctctccaactgcaaccacacctactgtcttaagtgcattcgcaagtggaggagtgctaagcagtttgagagcaagatcataaagtcctgcccagaatgtcggatcacatctaactttgtcgttccaagtgagtactgtgtggaggagaaagaagagaagcagaaactcattctgaaatacaaggaggcaatgagcaacaaggcgtgcaggtattttgatgaaggacatgggagctgcccgtttggagggaacggtttttataagcatgtgtaccctgatggccgtagagaggagccacagagacagaaggtgggaacatcaagcagatacccggcccaatgaaggaaccacttctgggaactcattgaggaaagagagaacagcagcccctttgacaacgatgaagaagaggttgtcacctttgagctgggtgagttgttgcttatgcttttggctgcagttggggacgatgaactaacagactctgaagatgagagcgacttgtttcatgaggagctggaagatttttatgacttggatctatagcaaccttgtgtggcgtgtgaactggtctgctgaccccagacagcagctgttccctgtggtggtgtggcagtgcctgtgttctctcctaggcaggcctgtcaactccaggtgctggcataagaatttttacccagggcctgtcttttcaacccctcacctttccccaaggagtgtgttgttttccctcttgaaaaaaagttagaaaaataaatcttaaagttagttttctgaaa

SEQ ID NO: 146 - protein, 1142 aa, Homo sapiens
MGDKDMPTAGMPSLLQSSSESPQSCPEGEDSQSPLQIPQSSPESDDTLYPLQSPQSRSEGEDSSDPLQRPPEGKDSQSPLQIPQSSPEGDDTQSPLQNSQSSPEGKDSLSPLEISQSPPEGEDVQSPLQNPASSFFSSALLSIFQSSPESTQSPFEGFPQSVLQIPVSAASSSTLVSIFQSSPESTQSPFEGFPQSPLQIPVSRSFSSTLLSIFQSSPERTQSTFEGFAQSPLQIPVSPSSSSTLLSLFQSFSERTQSTFEGFAQSSLQIPVSPSFSSTLVSLFQSSPERTQSTFEGFPQSPLQIPVSSSSSSTLLSLFQSSPERTHSTFEGFPQSLLQIPMTSSFSSTLLSIFQSSPESAQSTFEGFPQSPLQIPGSPSFSSTLLSLFQSSPERTHSTFEGFPQSPLQIPMTSSFSSTLLSILQSSPESAQSAFEGFPQSPLQIPVSSSFSYTLLSLFQSSPERTHSTFEGFPQSPLQIPVSSSSSSSTLLSLFQSSPECTQSTFEGFPQSPLQIPQSPPEGENTHSPLQIVPSLPEWEDSLSPHYFPQSPPQGEDSLSPHYFPQSPPQGEDSLSPHYFPQSPQGEDSLSPHYFPQSPPQGEDSMSPLYFPQSPLQGEEFQSSLQSPVSICSSSTPSSLPQSFPESSQSPPEGPVQSPLHSPQSPPEGMHSQSPLQSPESAPEGEDSLSPLQIPQSPLEGEDSLSSLHFPQSPPEWEDSLSPLHFPQFPPQGEDFQSSLQSPVSICSSSTSLSLPQSFPESPQSPPEGPAQSPLQRPVSSFFSYTLASLLQSSHESPQSPPEGPAQSPLQSPVSSFPSSTSSSLSQSSPVSSFPSSTSSSLSKSSPESPLQSPVISFSSSTSLSPFSEESSSPVDEYTSSSDTLLESDSLTDSESLIESEPLFTYTLDEKVDELARFLLLKYQVKQPITKAEMLTNVISRYTGYFPVIFRKAREFIEILFGISLREVDPDDSYVFVNTLDLTSEGCLSDEQGMSQNRLLILILSIIFIKGTYASEEVIWDVLSGIGVRAGREHFAFGEPRELLTKVWVQEHYLEYREVPNSSPPRYEFLWGPRAHSEVIKRKVVEFLAMLKNTVPITFPSSYKDALKDVEERAQAIIDTTDDSTATESASSSVMSPSFSSE

SEQ ID NO: 147 - DNA, 4337 bp, Homo sapiens
gctttgccggatgtgctttcccggcggccatcttgggagtctgaaggacctgaggcattttgtgacgaggatcgtctcaggtcagcggagggaggagacttatagacctatccagtcttcaaggtgctccagaaagcaggagttgaagacctgggtgtgagggacacatacatcctaaaagcaccacagcagaggaggcccaggcagtgccaggagtcaaggttcccagaagacaaaccccctaggaagacaggcgacctgtgaggccctagagcaccaccttaagagaagaagagctgtaagccggcctttgtcagagccatcatgggggacaaggatatgcctactgctgggatgccgagtcttctccagagttcctctgagagtcctcagagttgtcctgagggggaggactcccagtctcctctccagattccccagagttctcctgagagcgacgacaccctgtatcctctccagagtcctcagagtcgttctgagggggaggactcctcggatcctctccagagacctcctgaggggaaggactcccagtctcctctccagattccccagagttctcctgagggcgacgacacccagtctcctctccagaattctcagagttctcctgaggggaaggactccctgtctcctctagagatttctcagagccctcctgagggtgaggatgtccagtctcctctgcagaatcctgcgagttccttcttctcctctgctttattgagtattttccagagttcccctgagagtactcaaagtccttttgagggttttccccagtctgttctccagattcctgtgagcgccgcctcctcctccactttagtgagtattttccagagttcccctgagagtactcaaagtccttttgagggttttccccagtctccactccagattcctgtgagccgctccttctcctccactttattgagtattttccagagttcccctgagagaactcagagtacttttgagggttttgcccagtctcctctccagattcctgtgagcccctcctcctcctccactttactgagtcttttccagagtttctctgagagaactcagagtacttttgagggttttgcccagtcttctctccagattcctgtgagcccctccttctcctccactttagtgagtcttttccagagttcccctgagagaactcagagtacttttgagggttttccccagtctcctctccagattcctgtgagctcctcctcctcctccactttattgagtcttttccagagttcccctgagagaactcacagtacttttgagggttttccccagtctcttctccagattcctatgacctcctccttctcctctactttattgagtattttccagagttctcctgagagtgctcaaagtacttttgagggttttccccagtctcctctccagattcctgggagcccctccttctcctccactttactgagtcttttccagagttcccctgagagaactcacagtacttttgagggttttccccagtctcctctccagattcctatgacctcctccttctcctctactttattgagtattttacagagttctcctgagagtgctcaaagtgcttttgagggttttccccagtctcctctccagattcctgtgagctcctctttctcctacactttattgagtcttttccagagttcccctgagagaactcacagtacttttgagggttttccccagtctcctctccagattcctgtgagctcctcctcctcctcctccactttattgagtcttttccagagttcccctgagtgtactcaaagtacttttgagggttttccccagtctcctctccagattcctcagagtcctcctgaaggggagaatacccattctcctctccagattgttccaagtcttcctgagtgggaggactccctgtctcctcactactttcctcagagccctcctcagggggaggactccctatctcctcactactttcctcagagccctcctcagggggaggactccctgtctcctcactactttcctcagagccctcagggggaggactccctgtctcctcactactttcctcagagccctcctcagggggaggactccatgtctcctctctactttcctcagagtcctcttcagggggaggaattccagtcttctctccagagccctgtgagcatctgctcctcctccactccatccagtcttccccagagtttccctgagagttctcagagtcctcctgaggggcctgtccagtctcctctccatagtcctcagagccctcctgaggggatgcactcccaatctcctctccagagtcctgagagtgctcctgagggggaggattccctgtctcctctccaaattcctcagagtcctcttgagggagaggactccctgtcttctctccattttcctcagagtcctcctgagtgggaggactccctctctcctctccactttcctcagtttcctcctcagggggaggacttccagtcttctctccagagtcctgtgagtatctgctcctcctccacttctttgagtcttccccagagtttccctgagagtcctcagagtcctcctgaggggcctgctcagtctcctctccagagacctgtcagctccttcttctcctacactttagcgagtcttctccaaagttcccatgagagtcctcagagtcctcctgaggggcctgcccagtctcctctccagagtcctgtgagctccttcccctcctccacttcatcgagtctttcccagagttctcctgtgagctccttcccctcctccacttcatcgagtctttccaagagttcccctgagagtcctctccagagtcctgtgatctccttctcctcctccacttcattgagcccattcagtgaagagtccagcagcccagtagatgaatatacaagttcctcagacaccttgctagagagtgattccttgacagacagcgagtccttgatagagagcgagcccttgttcacttatacactggatgaaaaggtggacgagttggcgcggtttcttctcctcaaatatcaagtgaagcagcctatcacaaaggcagagatgctgacgaatgtcatcagcaggtacacgggctactttcctgtgatcttcaggaaagcccgtgagttcatagagatactttttggcatttccctgagagaagtggaccctgatgactcctatgtctttgtaaacacattagacctcacctctgaggggtgtctgagtgatgagcagggcatgtcccagaaccgcctcctgattcttattctgagtatcatcttcataaagggcacctatgcctctgaggaggtcatctgggatgtgctgagtggaataggggtgcgtgctgggagggagcactttgcctttggggagcccagggagctcctcactaaagtttgggtgcaggaacattacctagagtaccgggaggtgcccaactcttctcctcctcgttacgaattcctgtggggtccaagagctcattcagaagtcattaagaggaaagtagtagagtttttggccatgctaaagaataccgtccctattacctttccatcctcttacaaggatgctttgaaagatgtggaagagagagcccaggccataattgacaccacagatgattcgactgccacagaaagtgcaagctccagtgtcatgtcccccagcttctcttctgagtgaagtctagggcagattcttccctctgagtttgaagggggcagtcgagtttctacgtggtggagggcctggttgaggctggagagaacacagtgctatttgcatttctgttccatatgggtagttatggggtttacctgttttacttttgggtatttttcaaatgcttttcctattaataacaggtttaaatagcttcagaatcctagtttatgcacatgagtcgcacatgtattgctgtttttctggtttaagagtaacagtttgatattttgtaaaaacaaaaacacacccaaacacaccacattgggaaaaccttctgcctcattttgtgatgtgtcacaggttaatgtggtgttactgtaggaattttcttgaaactgtgaaggaactctgcagttaaatagtggaataaagtaaaggattgttaatgtttgcatttcctcaggtcctttagtctgttgttcttgaaaactaaagatacatacctggtttgcttggcttacgtaagaaagtagaagaaagtaaactgtaataaataaaagtgtcagtgactcatttatttgatgaaaaaaaaaaaaaaaaaa

SEQ ID NO: 148 - protein, 426 aa, Homo sapiens [sequence omitted]

SEQ ID NO: 149 - DNA, 1678 bp, Homo sapiens
cagccgtgctcagacagcttctggatcctaggctcatctccacagaggagaacacgcaggcagcagagaccatggggcccttcccagccccttcctgcacacagcgcatcacctggaaggggctcctgctcacagcatcacttttaaacttctggaacccgcccaccactgccgaagtcacgattgaagcccagccacccaaagtttctgaggggaaggatgttcttctacttgtccacaatttgccccagaatcttcctggctacttctggtacaaaggggaaatgacggacctctaccattacattatatcgtatatagttgatggtaaaataattatatatgggcctgcatacagtggaagagaaacagtatattccaacgcatccctgctgatccagaatgtcacccggaaggatgcaggaacctacaccttacacatcataaagcgaggtgatgagactagagaagaaattcgacatttcaccttcaccttatacttggagactcccaagccctacatctccagcagcaacttaaaccccagggaggccatggaggctgtgcgcttaatctgtgatcctgagactctggacgcaagctacctatggtggatgaatggtcagagcctccctgtgactcacaggttgcagctgtccaaaaccaacaggaccctctatctatttggtgtcacaaagtatattgcaggaccctatgaatgtgaaatacggaacccagtgagtgccattcgcagtgacccagtcaccctgaatctcctcccgaagctgcccatcccctacatcaccatcaacaacttaaaccccagggagaataaggatgtcttagccttcacctgtgaacctaagagtgagaactacacctacatttggtggctaaacggtcagagcctccccgtcagtcccggggtaaagcgacccattgaaaacaggatactcattctacccagtgtcacgagaaatgaaacaggaccctatcaatgtgaaatacgggaccgatatggtggcctccgcagtaacccagtcatcctaaatgtcctctatggtccagacctccccagaatttacccttcattcacctattaccgttcaggagaaaacctcgacttgtcctgcttcacggaatctaacccaccggcagagtatttttggacaattaatgggaagtttcagcaatcaggacaaaagctctttatcccccaaattactagaaatcatagcgggctctatgcttgctctgttcataactcagccactggcaaggaaatctccaaatccatgacagtcaaagtctctggtccctgccatggagacctgacagagtctcagtcatgactgcaacaactgagacactgagaaaaagaacaggctgataccttcatgaaattcaagacaaagaagaaaaaaactcaatgttattggactaaataatcaaaaggataatgttttcataattttttattggaaaatgtgctgattctttgaatgttttattctccagatttatgaactttttttcttcagcaattggtaaagtatacttttgtaaacaaaaattgaaatatttgcttttgctgtctatctgaatgccccagaattgtgaaactattcatgagtattcataggtttatggtaataaagttatttgcacatgttccgta

SEQ ID NO: 150 - protein, 135 aa, Homo sapiens
MRIMLLFTAILAFSLAQSFGAVCKEPQEEVVPGGGRSKRDPDLYQLLQRLFKSHSSLEGLLKALSQASTDPKESTSPEKRDMHDFFVGLMGKRSVQPEGKTGPFLPSVRVPRPLHPNQLGSTGKSSLGTEEQRPL

SEQ ID NO: 151 - DNA, 972 bp, Homo sapiens
agtgactgcagccttcctagatcccctccactcggtttctctctttgcaggagcaccggcagcaccagtgtgtgaggggagcaggcagcggtcctagccagttccttgatcctgccagaccacccagcccccggcacagagctgctccacaggcaccatgaggatcatgctgctattcacagccatcctggccttcagcctagctcagagctttggggctgtctgtaaggagccacaggaggaggtggttcctggcgggggccgcagcaagagggatccagatctctaccagctgctccagagactcttcaaaagccactcatctctggagggattgctcaaagccctgagccaggctagcacagatcctaaggaatcaacatctcccgagaaacgtgacatgcatgacttctttgtgggacttatgggcaagaggagcgtccagccagagggaaagacaggacctttcttaccttcagtgagggttcctcggccccttcatcccaatcagcttggatccacaggaaagtcttccctgggaacagaggagcagagacctttataagactctcctacggatgtgaatcaagagaacgtccccagctttggcatcctcaagtatcccccgagagcagaataggtactccacttccggactcctggactgcattaggaagacctctttccctgtcccaatccccaggtgcgcacgctcctgttaccctttctcttccctgttcttgtaacattcttgtgctttgactccttctccatcttttctacctgaccctggtgtggaaactgcatagtgaatatccccaaccccaatgggcattgactgtagaataccctagagttcctgtagtgtcctacattaaaaatataatgtctctctctattcctcaacaataaaggatttttgcatatgaaaaaaaaaaaaaaaaaaaaaaaaaaaaaaaaaaaaaaaaaaaa

SEQ ID NO: 152 - protein, 426 aa, Homo sapiens
MGLLSAPPCTQRITWKGLLLTASLLNFWNPPTTAQVTIEAQPTKVSEGKDVLLLVHNLPQNLTGYIWYKGQIRDLYHYITSYVVDGQIIIYGPAYSGRETIYSNASLLIQNVTQEDAGSYTLHIIMGGDENRGVTGHFTFTLYLETPKPSISSSKLNPREAMEAVSLTCDPETPDASYLWWMNGQSLPMSHRLQLSETNRTLFLLGVTKYTAGPYECEIRNPVSASRSDPFTLNLLPKLPKPYITINNLKPRENKDVLNFTCEPKSENYTYIWWLNGQSLPVSPRVKRPIENRILILPSVTRNETGPYQCEIRDQYGGIRSYPVTLNVLYGPDLPRIYPSFTYYRSGEVLYLSCSADSNPPAQYSWTINGKFQLSGQKLFIPQITTKHSGLYACSVRNSATGKESSKSMTVKVSGKRIPVSLAIGI

SEQ ID NO: 153 - DNA, 1973 bp, Homo sapiens
  misc_feature (1069)..(1168): n is a, c, g, or t
aggactctgcttgcccaacctgcagggtatgtttctgactgtgtaggtctgtgtgtgtccttctgtgtgtgtgtgtgtgtgtgtgtgtgtgtgtgtgtgtgtgtgtgtgtgtgtgtgtgtctgcacaaagtgtgtgttgaggtttggtgaaagaatcactgctgaaaaaaggcagaggcctccacaattcccagggacctgaaacacagacaaaaggaaaaacaggagggacaaggaggcaggactgagagaggaggggacagagaggtgtcctgggcctgaccccgcccatgaacctgagaggtgctcctgccccgggaagaagctcagcgcagaaggaggcaggacagcactgctgagagctgtgctcaggaagcttctggatcctaggctcatctccacagaggagaacacacagacagcagagaccatggggctcctctcagcccctccctgcacacagcgcatcacctggaaggggctcctgctcacaggtgaggagagaacctcctgggagaggacaggaggaggaagcagagtgactggatggggtctccttgagagtatggggtactaaaaaatgaaagaagccagcactttgggaggctgaggcaggtggatcatgagatcaggagttcaagatcagtctggccaacacagtgaagccctgtctctactaaaaatacaaaaatttaaccagatattgtggtgtgctcctctaatcctagctactcgggaggctgaggcagaagaatcacgtgaacccaggaggcagaagttgcagctagctgagatagtgccatcgcacgccagcctgggagacagtatgagactccatctcaaaaaaaaaaaaagagaaaaaagagaaaaaggaaagaaggctctattggagcctggatagggggaaatacaccagagagggacaggggtcaaaacaggaaagtcacaggaaccagaattggtaagaggtaggaaaatcttgtgttctgttttcctgattaatcatcaggggccaccacattttgaatatgataataataactgtatcagatgacacttcacataaaannnnnnnnnnnnnnnnnnnnnnnnnnnnnnnnnnnnnnnnnnnnnnnnnnnnnnnnnnnnnnnnnnnnnnnnnnnnnnnnnnnnnnnnnnnnnnnnnnnnaaaaatgccaaggtcagaagtgttgaaggaatgggggtcatggggctgaccttgacctagtaggatagtaggacacacacacatacacacacacagacacacatgccgcttttgtgtgtgtgtgtgcgtgtgtttgtatgtgtgtgtgtctgtgtcttcaaggctgaggactgaagagaacttctcaggacccagggccccatgttttcacaccaatacatagctctcaatattgactgatgctctctccacctcctagcatcacttttaaacttctggaacccacccacgactgcccaagtcacgattgaagcccagccaaccaaagtttctgaggggaaggatgttcttctacttgtccacaatttgccccagaatcttactggctacatctggtacaaagggcaaatcagggacctctaccattacattacatcatatgtagtagacggtcaaataattatatatgggcctgcatacagtggacgagaaacaatatattccaatgcatccctgctgatccagaatgtcacccaggaagacgcaggatcctacaccttacacatcataatgggaggtgatgagaatagaggagtaactggacatttcaccttcaccttatatcgtgagtgattccacatgatccctgggtgttgggggacaggggtcacttctacttcacacacacaggattgtcaggcctggacattgcctgtgtccctctctgcattatgtcccatgctggggtttgggcatttagtgcaggacacacacagaggagacaaatttcaacagatcagaattc

SEQ ID NO: 154 - protein, 150 aa, Homo sapiens
MAKIILRHLIEIPVRYQEEFEARGLEDCRLDHALYALPGPTIVDLRKTRAAQSPPVDSAAETPPREGKSHFQILLDVVQFLPEDIIIQTFEGWLLIKAQHGTRMDEHGFISRSFTRQYKLPDGVEIKDLSAVLCHDGILVVEVKDPVGTK

SEQ ID NO: 155 - DNA, 450 bp, Homo sapiens
atggcaaaaatcattttgaggcacctcatagagattccagtgcgttaccaggaagagtttgaagctcgaggtctagaagactgcaggctggatcatgctttatatgcactgcctgggccaaccatcgtggacctgaggaaaaccagggcagcgcagtctcctccagtggactcagcggcagagacgccaccccgagaaggcaaatcccactttcagatcctgctggacgtggtccagttcctccctgaagacatcatcattcagaccttcgaaggctggctgctgataaaagcacaacacggaaccagaatggatgagcacggttttatctcaagaagcttcacccgacagtacaaactaccagatggtgtggaaatcaaagatttgtctgcagtcctctgtcatgatggaattttggtggtggaagtaaaggatccagttgggactaag

SEQ ID NO: 156 - protein, 261 aa, Homo sapiens
MDWGTLHTFIGGVNKHSTSIGKVWITVIFIFRVMILVVAAQEVWGDEQEDFVCNTLQPGCKNVCYDHFFPVSHIRLWALQLIFVSTPALLVAMHVAYYRHETTRKFRRGEKRNDFKDIEDIKKQKVRIEGSLWWTYTSSIFFRIIFEAAFMYVFYFLYNGYHLPWVLKCGIDPCPNLVDCFISRPTEKTVFTIFMISASVICMLLNVAELCYLLLKVCFRRSKRAQTQKNHPNHALKESKQNEMNELISDSGQNAITGFPS

SEQ ID NO: 157 - DNA, 786 bp, Homo sapiens
atggattgggggacgctgcacactttcatcgggggtgtcaacaaacactccaccagcatcgggaaggtgtggatcacagtcatctttattttccgagtcatgatcctcgtggtggctgcccaggaagtgtggggtgacgagcaagaggacttcgtctgcaacacactgcaaccgggatgcaaaaatgtgtgctatgaccactttttcccggtgtcccacatccggctgtgggccctccagctgatcttcgtctccaccccagcgctgctggtggccatgcatgtggcctactacaggcacgaaaccactcgcaagttcaggcgaggagagaagaggaatgatttcaaagacatagaggacattaaaaagcagaaggttcggatagaggggtcgctgtggtggacgtacaccagcagcatctttttccgaatcatctttgaagcagcctttatgtatgtgttttacttcctttacaatgggtaccacctgccctgggtgttgaaatgtgggattgacccctgccccaaccttgttgactgctttatttctaggccaacagagaagaccgtgtttaccatttttatgatttctgcgtctgtgatttgcatgctgcttaacgtggcagagttgtgctacctgctgctgaaagtgtgttttaggagatcaaagagagcacagacgcaaaaaaatcaccccaatcatgccctaaaggagagtaagcagaatgaaatgaatgagctgatttcagatagtggtcaaaatgcaatcacaggtttcccaagctaa

SEQ ID NO: 158 - protein, 309 aa, Homo sapiens
MSLEQRSLHCKPEEALEAQQEALGLVCVQAATSSSSPLVLGTLEEVPTAGSTDPPQSPQGASAFPTTINFTRQRQPSEGSSSREEEGPSTSCILESLFRAVITKKVADLVGFLLLKYRAREPVTKAEMLESVIKNYKHCFPEIFGKASESLQLVFGIDVKEADPTGHSYVLVTCLGLSYDGLLGDNQIMPKTGFLIIVLVMIAMEGGHAPEEEIWEELSVMEVYDGREHSAYGEPRKLLTQDLVQEKYLEYRQVPDSDPARYEFLWGPRALAETSYVKVLEYVIKVSARVRFFFPSLREAALREEEEGV

SEQ ID NO: 159 - DNA, 1755 bp, Homo sapiens
agagagaagcgaggtttccattctgagggacggcgtagagttcggccgaaggaacctgacccaggctctgtgaggaggcaaggttttcaggggacaggccaacccagaggacaggattccctggaggccacagaggagcaccaaggagaagatctgcctgtgggtcttcattgcccagctcctgcccacactcctgcctgctgccctgacgagagtcatcatgtctcttgagcagaggagtctgcactgcaagcctgaggaagcccttgaggcccaacaagaggccctgggcctggtgtgtgtgcaggctgccacctcctcctcctctcctctggtcctgggcaccctggaggaggtgcccactgctgggtcaacagatcctccccagagtcctcagggagcctccgcctttcccactaccatcaacttcactcgacagaggcaacccagtgagggttccagcagccgtgaagaggaggggccaagcacctcttgtatcctggagtccttgttccgagcagtaatcactaagaaggtggctgatttggttggttttctgctcctcaaatatcgagccagggagccagtcacaaaggcagaaatgctggagagtgtcatcaaaaattacaagcactgttttcctgagatcttcggcaaagcctctgagtccttgcagctggtctttggcattgacgtgaaggaagcagaccccaccggccactcctatgtccttgtcacctgcctaggtctctcctatgatggcctgctgggtgataatcagatcatgcccaagacaggcttcctgataattgtcctggtcatgattgcaatggagggcggccatgctcctgaggaggaaatctgggaggagctgagtgtgatggaggtgtatgatgggagggagcacagtgcctatggggagcccaggaagctgctcacccaagatttggtgcaggaaaagtacctggagtaccggcaggtgccggacagtgatcccgcacgctatgagttcctgtggggtccaagggccctcgctgaaaccagctatgtgaaagtccttgagtatgtgatcaaggtcagtgcaagagttcgctttttcttcccatccctgcgtgaagcagctttgagagaggaggaagagggagtctgagcatgagttgcagccaaggccagtgggagggggactgggccagtgcaccttccagggccgcgtccagcagcttcccctgcctcgtgtgacatgaggcccattcttcactctgaagagagcggtcagtgttctcagtagtaggtttctgttctattgggtgacttggagatttatctttgttctcttttggaattgttcaaatgtttttttttaagggatggttgaatgaacttcagcatccaagtttatgaatgacagcagtcacacagttctgtgtatatagtttaagggtaagagtcttgtgttttattcagattgggaaatccattctattttgtgaattgggataataacagcagtggaataagtacttagaaatgtgaaaaatgagcagtaaaatagatgagataaagaactaaagaaattaagagatagtcaattcttgccttatacctcagtctattctgtaaaatttttaaagatatatgcatacctggatttccttggcttctttgagaatgtaagagaaattaaatctgaataaagaattcttcctgttaaaaaaaaaaaaaaaaaaaaaaaaaaaaaaaaaaaaaaaaaaaaaa

SEQ ID NO: 160 - protein, 429 aa, Homo sapiens
METQFRRGGLGCSPASIKRKKKREDSGDFGLQVSTMFSEDDFQSTERAPYGPQLQWSQDLPRVQVFREQANLEDRSPRRTQRITGGEQVLWGPITQIFPTVRPADLTRVIMPLEQRSQHCKPEEGLQAQEEDLGLVGAQALQAEEQEAAFFSSTLNVGTLEELPAAESPSPPQSPQEESFSPTAMDAIFGSLSDEGSGSQEKEGPSTSPDLIDPESFSQDILHDKIIDLVHLLLRKYRVKGLITKAEMLGSVIKNYEDYFPEIFREASVCMQLLFGIDVKEVDPTSHSYVLVTSLNLSYDGIQCNEQSMPKSGLLIIVLGVIFMEGNCIPEEVMWEVLSIMGVYAGREHFLFGEPKRLLTQNWVQEKYLVYRQVPGTDPACYEFLWGPRAHAETSKMKVLEYIANANGRDPTSYPSLYEDALREEGEGV

SEQ ID NO: 161 - DNA, 1837 bp, Homo sapiens
gagtggcagagggcagcgggtccaggctccatgaggaggcaagccttgggaatctgagggatggagactcagttccgcagagggggtctggggtgcagccctgccagcatcaagaggaagaagaagagggaggactcaggagactttggactccaggtgagcactatgttctcagaggacgacttccagtcaacagaaagagccccatatggtccacaactacagtggtcccaggatctgccaagagtccaggtttttagagaacaggccaacctggaggacaggagtcccaggagaacccagaggatcactggaggagaacaagtgctgtggggccccatcacccagatatttcccacagttcggcctgctgacctaaccagagtcatcatgcctcttgagcaaagaagtcagcactgcaagcctgaggaaggccttcaggcccaagaagaagacctgggcctggtgggtgcacaggctctccaagctgaggagcaggaggctgccttcttctcctctactctgaatgtgggcactctagaggagttgcctgctgctgagtcaccaagtcctccccagagtcctcaggaagagtccttctctcccactgccatggatgccatctttgggagcctatctgatgagggctctggcagccaagaaaaggaggggccaagtacctcgcctgacctgatagaccctgagtccttttcccaagatatactacatgacaagataattgatttggttcatttattgctccgcaagtatcgagtcaaggggctgatcacaaaggcagaaatgctggggagtgtcatcaaaaattatgaggactactttcctgagatatttagggaagcctctgtatgcatgcaactgctctttggcattgatgtgaaggaagtggaccccactagccactcctatgtccttgtcacctccctcaacctctcttatgatggcatacagtgtaatgagcagagcatgcccaagtctggcctcctgataatagtcctgggtgtaatcttcatggaggggaactgcatccctgaagaggttatgtgggaagtcctgagcattatgggggtgtatgctggaagggagcacttcctctttggggagcccaagaggctccttacccaaaattgggtgcaggaaaagtacctggtgtaccggcaggtgcccggcactgatcctgcatgctatgagttcctgtggggtccaagggcccacgctgagaccagcaagatgaaagttcttgagtacatagccaatgccaatgggagggatcccacttcttacccatccctgtatgaagatgctttgagagaggagggagagggagtctgagcatgagatgcaaccagggccagcgggcagggaaatgggccaatgcatgcttcagggccacacccagcagtttccctgtcctgtgtgaaatcaggcccattcttccctctgtgtttgatgagagaagtcagtgttctcagtagtagaaggcacagtgaatggaagggaacacattgtatactgcctttaggtttctcttccatcgggtgacttggagatttctttttgtttccctttggtaattttcaaatattgttcctgtaataaaagttttagttagcttcaacatctaagtgtatggatgatactgaccacacatgttgttttgcttatccatttcaagtgcaagtgtttgccattttgtaaaacattttgggaaatcttccatcttgctgtgatttgcaataggtattttcttggagaatgtaagaacttaacaataaagctgaactggtgttgtgaaacagagaaaaaaaaaaaaaaaaaa

SEQ ID NO: 162 - protein, 315 aa, Homo sapiens
MSLEQRSPHCKPDEDLEAQGEDLGLMGAQEPTGEEEETTSSSDSKEEEVSAAGSSSPPQSPQGGASSSISVYYTLWSQFDEGSSSQEEEEPSSSVDPAQLEFMFQEALKLKVAELVHFLLHKYRVKEPVTKAEMLESVIKNYKRYFPVIFGKASEFMQVIFGTDVKEVDPAGHSYILVTALGLSCDSMLGDGHSMPKAALLIIVLGVILTKDNCAPEEVIWEALSVMGVYVGKEHMFYGEPRKLLTQDWVQENYLEYRQVPGSDPAHYEFLWGSKAHAETSYEKVINYLVMLNAREPICYPSLYEEVLGEEQEGV

SEQ ID NO: 163 - DNA, 1814 bp, Homo sapiens
gtgcgcactgggggtcagagagaagggagaggcctccttctgaggggcggcttgataccggtggaggagctccaggaagcaggcaggccttggtctgagacagtgtcctcaggtcgcagagcagaggagacccaggcagtgtcagcagtgaaggttctcgggacaggctaaccaggaggacaggagccccaagaggccccagagcagcactgacgaagacctgcctgtgggtctccatcgcccagctcctgcccacgctcctgactgctgccctgaccagagtcatcatgtctctcgagcagaggagtccgcactgcaagcctgatgaagaccttgaagcccaaggagaggacttgggcctgatgggtgcacaggaacccacaggcgaggaggaggagactacctcctcctctgacagcaaggaggaggaggtgtctgctgctgggtcatcaagtcctccccagagtcctcagggaggcgcttcctcctccatttccgtctactacactttatggagccaattcgatgagggctccagcagtcaagaagaggaagagccaagctcctcggtcgacccagctcagctggagttcatgttccaagaagcactgaaattgaaggtggctgagttggttcatttcctgctccacaaatatcgagtcaaggagccggtcacaaaggcagaaatgctggagagcgtcatcaaaaattacaagcgctactttcctgtgatcttcggcaaagcctccgagttcatgcaggtgatctttggcactgatgtgaaggaggtggaccccgccggccactcctacatccttgtcactgctcttggcctctcgtgcgatagcatgctgggtgatggtcatagcatgcccaaggccgccctcctgatcattgtcctgggtgtgatcctaaccaaagacaactgcgcccctgaagaggttatctgggaagcgttgagtgtgatgggggtgtatgttgggaaggagcacatgttctacggggagcccaggaagctgctcacccaagattgggtgcaggaaaactacctggagtaccggcaggtgcccggcagtgatcctgcgcactacgagttcctgtggggttccaaggcccacgctgaaaccagctatgagaaggtcataaattatttggtcatgctcaatgcaagagagcccatctgctacccatccctttatgaagaggttttgggagaggagcaagagggagtctgagcaccagccgcagccggggccaaagtttgtggggtcagggccccatccagcagctgccctgccccatgtgacatgaggcccattcttggctctgtgtttgaagagagcaatcagtgttctcagtggcagtgggtggaagtgagcacactgtatgtcatctctgggttccttgtctattgggtgatttggagatttatccttgctcccttttggaattgttcaaatgttcttttaatggtcagtttaatgaacttcaccatcgaagttaatgaatgacagtagtcacacatattgctgtttatgttatttaggagtaagattcttgcttttgagtcacatggggaaatccctgttattttgtgaattgggacaagataacatagcagaggaattaataatttttttgaaacttgaacttagcagcaaaatagagctcataaagaaatagtgaaatgaaaatgtagttaattcttgccttatacctctttctctctcctgtaaaattaaaatatatacatgtatacctggatttgcttggcttctttgagcatgtaagagaaataaaaattgaaagaataa

SEQ ID NO: 164 - protein, 136 aa, Homo sapiens
MKDSNRCCCGQFTNQHIPPLPSATPSKNEEENKQVETQPEKWSVAKHTQSYPTDSYGVLEFQGGGYSNKAMVRKAFRHGATRITAFIGGQSPSPKLQIPGLLHGCGSIFLDISLKNQEIYLCTWLLAMRLGNWTPL

SEQ ID NO: 165 - DNA, 1025 bp, Homo sapiens
ggggtccctgccctggccaaggaggaggctgaaagagcctgagctgtgccctctccattccactgctgtggcagggtcagaaatcttggatagagaaaaccttttgcaaacgggaatgtatctttgtaattcctagcatgaaagactctaacaggtgttgctgtggccagttcaccaaccagcatatcccccctctgccaagtgcaacacccagcaaaaatgaagaggaaaacaaacaggtggagactcagcctgagaaatggtctgttgccaagcacacccagagctacccaacagattcctatggagttcttgaattccagggtggcggatattccaataaagccatggtgagaaaggcattcagacatggtgccactaggatcacagctttcattggcggccagtctcccagccccaaactgcagatacctggtcttcttcatggctgtggctcaatcttcctagatatttcattgaaaaaccaagagatatatctgtgcacatggcttttagccatgaggcttggaaactggacaccactgtaaagaacatctagtgtcccgtaaatccataccaaagctctgaatccacaaaccaggctctggcccaaccctgcaaacacactccattgctccatcttcagtaaaggaagacaaattcatttttctaataactgtggacctgcagcccccttagatgtgttgagagtctttggaaatattttcctctgaggtctgtccacagcttccctgggcctgcgctcagctggcccgagaaggaccaaggtccctcacatttgcatgtaaacagggagtgccctctgcccttccagtgagccctgccagcgtgggggaggcttcagctctgtgatccgttccagctcactctgaattacactcctacatgcccagtcacagactttttgcaatttcattttatttcactggcccaacatcattgttaaaataaaatttagttgtgttccaaatgctcaaaaaaaaaaaaaaaaaaaaaaaaaaaaa

SEQ ID NO: 166 - DNA, 776 bp, Homo sapiens
gggaagcaggcgcaggctccgtgaggaggcaagaggaaaggccaagaactgacaaattaataaagggccatctacaagccaggaataaggccatcaccagaagacaaccccgccagtccttgatctgggacttccacatttcaaaactgaaaaaagataaatttctgttgtttcagctactcagtcaatggcattttgttatggcagcctaagctaagacataacctcagcctgctggcctgccttcactgtcctgggggaggcatggagagaccaggtggactggagtagactgttgagagacactggtctggtgaagatgtccaggaaaccacgagcctccagcccattgtccaacaaccacccaccaacaccaaagaggttgccaagacaacccggaagggaacagggacccgtcaaggaagttccaggaacaaaaggctctccctaaaagaccgccgcttcaaaaaaacctgaggaatggagtgggccaacactatccagccactccgaccagccaaaagaactcaatcaaaatgagacacagtaggaccacaagggcaaggagaccaccaccttctccagtctctctttgggcagccagtaattcccgggcaaggccagaaacctcaaggctacctgaaaagtctccagaggtctaaccccagaaaaatagccaacagggtgtagagtacattttataccccaaagggtataccccatggtgacgaaaataaaatgaacatgttgtaaaaaaaaaaaaaaaaaaaaaaaaa

SEQ ID NO: 167 - DNA, 86945 bp, Homo sapiens
tagttgcttcactttcccttgtctagaaaagattgctgtagtaattattattaacactcttaataataatggtaaccagtaataataactgagcctttttacatcccagggttagtattataattggtgccttatgtattaattcttctgatcctcaccagaggaagctcacaaaggtaactaactggctaagcctctcataggcagtaggtgatacagcctgaagaacccagatggttcagctcctgaatccttcttcttaccattatgttctgccacgtctcacataccagtgggaatccacacagcagatgacccttaactttgttctgtaaaaattccatagtaggtaaaataagctatcacccaaggggtttctctactctccaatacagaaaatggacattagcctagtgataccaaaatgctactgctcttcgtgtgaaatcctagccagttgaaaccattaaaggggacaaatgtcactgagcatctactggatgccagacattatttcatgcatttcaatgtgatttatctcacttagtcaaaaaaaaatatatatggtaaatttgaagaatggttaaagaagtgggtgaacagccttggcattttctcaacactataatttttttggttgtttactttgttttttcttgtaattaagtaataataaaaagttcaataacaacagctcacttttttgaagaatggttaaagaagtgggtgagcagccttggcattttctcaacactataatttttttggttgtttactttgttttttttcttgtaattaagtaataataaaaagttcaataacaacagctcactttttttttttttttttgagacagagtctcgctctgtcccccaggctggagtgcactggcgagatctcagctcactgcaagctccaccttccaggttcacaccattctcctgcctcagcctcctgagtagctgggactacaggcatccgccaccatgcccggctaattttttgtattttttttagtcgagacggggtttcatcatgtcagccaggatggtctcgatctcctgacctcgtgatctgcccgcctcggcctcccaaagtgctgggattataggtgtgagccaccgtgcccagccaacaacagctcactttcaaaatgtatgttactctttagaatgtattcaatcactaatttttgctatgtgcgagttgttcttatagtggccagagtccctcttcaaataggtgataaaatatcttaaagtatgtgaatattcatatgtctcaagttcagttaacaaacaaatataattagattaagccttgatatttctaatagacttctctaataaatgtattttcttaatttctactattattaatgctttttatttaaaattgaggatgtgatacataagaaataaatataactagagccttcatatttctaagttttctctaataaatatatttccttaatttctaccactattaatgcttatttaaaattaagcatgtgataactatttgttgccacctcatacaaaataaaataatgtaatattaattatgcttattgtgcatgtgctttgtgtcgacttacggtgtaagttgtctagtagctcagttagcccccacttgccaaactatgtagtcataccaatttttttttcagatggataaagggaggcaggagggttttgtaaccacagagttcatcatcagaggtgaacaggaccaagatttgaacctgacagtttttcttcagagttggaaatcttaatctccatacatacttgaggttttcggatcctcaccaaattttcagttatctaacttaaatacggacaatgtgaaggtcacaaaattactttcagtcatctctaagataaatctcagagagataagcaatttttcagcagatgaaatataattaaaacaagagattacgtaccttctggtcctgttgccaagagatcactggtttcccccaaggcttgatctattcatgagggcagacgttggaatacttcgaatttctcctcatctaggtaagcttcgggatgcattatggcaaccagaataattttattcaagaataggaaaggccagctagtttagcacacttagacatgaaatttactattatcatatttaattcaatcttatttcttttctatttcaatttacagatagaaattatagagtagttttataggctgacctgtgtaaactccttctcataattttttaatacagtcctgaggattctatacaataatgtaattgtgttgcctgccattcaatgagtaattggccttcaggtttctcttaatgatggtaaataagatgttacgatttcctttgttttctgtaagatatttaataatgaatgtctcaatctaccacaatgtttaactttggggaacaagatctgaaaaaaatatactcttaaaaacttaaatgttgaattattccttcacatgtaatgtcctgacactgatgtttctaccagcatacagggagtaaatattcaaaatgattgcataaatgtatacaaactagaggctaggaactggtaagccttgtccagatgacaagacactctttgctaaaattaacattctctctcacctcagaggtttcatcattgctattgttgtcaatattgctgtttattaaaactgtattctgtaaattaccagtgagagtgagtggttttaatattactttagtgtccacatagaaattcttcagtgatgagaagacccaaaagattgctcactgtacagggactcttggctagctaaaaaaaaaaaaaaaaaaaaaaaaaaaaaaagctaaatatttccattgctgagatgtaaacgaagaattcccaaacatttgaggtatctgtttaatgtctaaaataagaagttgaaacctttcactaacaacttgtgctgtgaaacacataagtttaaatgagtaattcaacagttactgtttggatttacatagaaagacttttgccaaagcctgtgctgaacacatatcaaaacaattatgcctagcatgtacacagtgataagaatgttttcttttggcatccactagaggagaaacttagagcagcaccactttctgccgctacccttgggtccatgctgcggtagttacttacctgaattgtcctcggagtaactgcatttccttgtatatgaaatggacctaaagtaatggatttgcccattagtgaataatattagaaacaatttcaattgtaatgcaattgctgttcagttccatgcaatttctgcatagaaacacaactgaaagaaaaatgacaaccaatcaaccagtaaaacggcaataaatactttttaggtgagaaaacgtcaaaagagtgtggatttggaagtccttccattgtgctaattatcgatcttttttctctctctgaacacttgtcaacagtcattaggtttatacaattttctctttttaatgcatcaaaaaatcaccaaataggaagaagtaaatctgtataacgggacatctaacaattggttttaaaatacataacctacagtctaaaataaagaagaaatatatacatgtgaagcttttttttgactgactatattataaaatatgctaaaattgtactgcaaatgaactctcctcacctcccaaataataacaaaacatacagtgaaacaaaattgtacaagtttatattaaggctctcaaatttaaactaagcataaaaactgagcaatttatcttgggattctaaaaaataaaaatgaatctaacaaaattcaaattgatgatacccgacatgttgtcataatataacaaagtttactctctgaagaaatatcaagttttaaaaataaataggaacaaaaccaagcatcatctaaaggccagtttctagttttctcagcaccatgggtaacttttgtaagaaatgagataatcctgtagtcccagctacttggggggctgaggcaggagaatggccagaacccgggaggcggagcttgcagtgagcggagatcgcaccactgcattccggcctgggtgaaagagcgagactccgtctcaaaaaaaaaagaaatgagataattagatttaccgcaaatgaaattttgatgaagtgctattgaagtataatattctatgaaatcccttgttaccttgaaaggagctaaatgacaactgcttgattatcatgggacaaagataactttaggtttttttcttctaaattgtggatagtgactatttcggtattttctgtaatggtattttctgtaagtgatattacccagcttttaggtccacatcttagccaaatcacttcctgaaacctgacttacaacaaaaaccttctttgttcttccttagcctgtgaatagtggcagcatttaaaattaataccatgcaattaccttctgttctatgataatctttcatattttctcttgttttctcaaactcttcataactcttaggtcaaatttcatgcactatatagttcccttccttttgtatcacctttatgtagctaagattatagtaagttgttaacaagaatttatagatttatcggtcaaattattaaccgttcaacaagaagaccaaagccaatgtaatatttttaaaagtagggattaagaaaattacctttggtattatccttaaagagagttttagtccttattttccaatacatacactcaactatacctcccgttttgtaagaaaaccacctgcattagggaacatttcttaaattgttgaagtcttaacattgatacatttaactatttacttacaatctttgggaatattatagaggatattcactaaagataattaaagagattgtactccacatgtcagatgaatggctttaaaaccttagtagaattcaccaggatttttgcttaaagtgcaaatttctcagttagttccaagtccagagattctgatttaacaggcatagaacaggacctgggaatctgcattttaaataaactcaaggtccatcttaaatgcactcagaaataagtgattttactacttgagaaatgtaacttgaggagtttaaaatctgtgaaatctgtgataaaaattaattatgtggctgggcatggtggctcatgcctgtaatcccaacactttgggaggccaaggcaggcagatcacaaggtcaggagttcaagaccagcatggccaatatggtaaaaccccgtctttactaaaaatacaaaaaaatgtaaccaggtgtggtggctggtgccagctacttgggaggctgaggcaggagaattgcttgaaccggggaggtggaggttgcagtgagcctagattgcaccactgcactgcagcctgggtgacagagtgagactccagttcaaaaaaaaaaaaaaaattaaatatgtgctttggcactttaaagagaagtaaataaatgattcgtgtttggcttctattctgtccatctctgctaattttctttctttctttattcaccttggctggtctgtgtatttacatgtaactttcatgaaaactccatccatcttcatcaatacacataatacataccttgcaaggccctttttagaagtcctattcaaatatttctgagccagatgaatcagtctgtgttagtctgttttcatgcaaataaagacatacttgacgggtcatttataaagaacaagtgatttagtggactcacagtttcacatggctggggaggcctcacagtttcacatggctgggaaggcctcacaatcatggcagaaagcaaaggaggagcaaaggcatgtcttagatggcagcaggcaaaagagcttgtgcaggtgaactcccattatgaaaccaacagggacttattcattaccatgagaacagtatgggggagaccgcccccatgattcaattatctccacctggccctgcccttgacatattgagattattacaattcaaggtgagatttgggtggggacagagccagaccatatcacagtcccataatctcttttgtagtgataaaaatcacaagtctgaaccattcatgatattttcttatactataatttatgaaagacttacggaagatttttttgtatctcctccaccttcactattgcaatggattaaatggttgtttttctccccccacccaaattcatatgtcaaaatcctaacccacaatgtatggtactaggaggtggggtctttgggagcaaattacatcatgagactggagcccatgtgaatgagattagcacccttataaaaaagaccccagagaactctcttgctctttttctattgtgtgaggatataaagaaaagacggcagtctacaagtcagaagagggtcctcacaagaattaatccatgctggcactctaatctcatatttctgaactcaagatctgtgagaaataaatttctgttgtttataaacccatccagtttacaaagtgcctagtctatggtactttgctctggcagcacaaactaaaacaactatatttttaagaaaaaaaaaatgcatgaacatacatctataaaagtcttcaacctgataactctgaaataacttttactttaatggtattcatataagaaagaaatgtatgaagccaaaataaatctcaaaattaagggggaatattacttaccaaaatgcatgtttgctttgccaaagcctgaaacttttttctttttaagcaaattgaaaacctcaaagatttcaatattttttattacttatcccagcaaaatcattcagaccacttatttttaaaattatatagtcactgatttatttcacttttatgcagttaggataggaagtggaggtcaattggaaaatataattataggaataggaccatcatgaaatgattttttaatttattaccattcagagcatctatacttgtttgtcacacattcagaagaatggaagaaaggagggtagagaatgagtcatatgcattgaaaattattattcagtttcaaaatgagtgcccaaaactatagacactgtaagacactgaatttgaatattttacatttcattcttctattaaaattcatttcattgagaacaaaaagaaaacaagaaaaaataagaagataagcatcttcagagaaacaactacagcccgaaaccatgaactgagaagcaaaccttccaaatactgttatatttcaactaaaacaaggagtgatcagagtgaatgctttcacatgtataatcagtacatgttcaggatggtcattttttccagctatcattgccactactctgggagatgtaactcaaaaactatttttcttaaaattgttagattttatggaataatgtgaccatgatattaataaaagtaggaaagtcactatagagtaactcagtgttgtctaaccataaaatggaaagaatttgaagttgtaagagaattcaggctgatgtactctattcatttcatatactctgagttccaaacagaatgaagctcacagaagtggagaggagcaaaagagaaaagcattaaccagcatgtgataatatagagattagaaatgtagatttagaaacctaggaatctaaatatgagccacattacctttagaaaagtgaatgctgataggaggagaaacaagtgtccagtacttagggagtaaggaaattagtgtgacagtattccattacaaaaacatggatttaaaaaaaggtacaaactgcaatgccacaccgctcctgccccagaggatcccttagctaatacctggatctgttctatgaggaatgcagagagaaaaaaatcagtaaaatatatatgcctggtgttctattttctaaatatgaaaatgaacaaaaagcataaacaagatgcagttgctaaaactaaatcacaagtagaattaccaaagtaatcagagaacaaattgaagttaacttaatctcaatttagaaattgaagtgaacaactaaggaattatataaaaaagaaatacataggcactatacatcagcaattacatccagaaaaatagtgaatatctagaagaaaccacacaaaagtaaattatatgaaaagacaaaggcataataaaaatccttaatatggcattggtaaatatagatgcatgacaatggagactcaacctctgcctacttgatgttttgaagaataagaaagaacattaatactggaaacattacttgttgaaaacttcaaagagataaaatgacacttgaatctatagattaaaatagcattctgttttttagacaaaaatatagagatactgatcatcactaagactgactttgattcacttactagatttgaagaataaagcaataggataattgtcatctgggcagttaaacaagtctctgagaattcaactgttgccgataaagaattaatgattaccagaattatgcaacttttgtaaacgtctagaaatccagaacaagtatataaactgtttttattgcatgaaaaaaataggcagcccaaaactgtcatttctgagagaaagaaaacaatatataccctttattgtgccagcatacttactgaaagtgatttccagcctccagcatggtatgagacaatccgagagagaatatcatgatttgctgaatttaagagcaagatatcaaagtttatgtaggccaaggtgactagaatcatcaaggcagactgacagagagaagagggctgcacagagagagaactgtggagatttacatagaggttctctggagtccttgagtgagaactgaactgtgcctacataaagtaaaactccatgagatagaaaaatgagtcttcattagcaatgggccagagaaattcctggaggtcatatgggccttagaagaacccgtatgtgctccagccagagtgagaaacttataatagcagatagagttctcagaataatcacaccttagtagcggggtgaatcagttctagagtcaaggctctgaagccattataatcacatttaaaagcaaacaatatcaccattgatctcagataacttaactgcatttgaaaacaaagttcatctctctttaaagaaataaaacaaaatccagatcctaacaatgtagaattcagaatttcccttagacattaaaaaaataacagaaatgcatataaacaaaaaaattgatccaaaacaagacaaaaattaatcaaaacagaccaagaaaagatagaaattatgggattagaaaatattaagcagcttaacaacacacataattgaaatcccaggaaatgggggcagggcaaaaactacttgtaaaggtagtggttgagatatttttaaaacttggtaaaactataaaccaacaggtaaaagaagtgcagtggactcaaagcaaaatgaataaaaggattaagttgaagaaagttgtttttaaaaagaaaacttaaaaacagttggagaaaaagagatgtattactgacaatggaaccaatgtaataactactttttatgataagcatgtatatcagaagacagtagcgcaacattctattacttaaagcaagagaaacaagtcaacctggaaattcattcaagtgaaaattctaaaaaaatcaagaaatttacaaaaatgaaagcaaataaagctattttgacaataagtagctgatagattttatcaacaacatactgggactgaaagaaatggtagacaaaaagaaagtaacaggatgataatgtactttttttattattatactttaagttttagggtacatgtgcacaacgtgcaagtttgttacatatgtatatatgtgccatgttggtgtgctgcacccattaactcgtcatttaacattaggtatatctcctaatgctatccctcccccctccccccaccccacaacaggccttggtgtgtgatgttccccttcctgtgttctcattgttcaattcccacctatgagtgagaacatgcggtgtttgtttttttgtccctgcgatagtttgctgagaatgatggtttccagcttcatccatgtccctataaaggacatgaactcatcgttttttatggctgcatagtattccatggtgtctatgtgccacattttcttaatccagtctatcattgttggatatggggtaaaggattcctatttaataaatggtgctgggataatttacatttttaaaaagaaatgattcatgttagaaataatacatagggcagtgcatggtggctcacgcctgtaatttcagcactttgggaggttgaggtgggcggatcacaaggtcaggagttggagaccagcctgaccaacatggtcaaaccctgtctctactaaaaatacaaaaattagctgggtgtggtggcacgtgcctctaatcccacctactcaggaggctgaggcaggagagtctctcgaacccacgaagtggaggttacagtgagccatgattgcaccactgcactccagcccgggcaacagagcaagactccatctcaaaaaaaaaaaaaaaaaaaaaaaggaaaaagaaacaatacatacaaaagacattttttcatgttttaagtaatgttaaaggtaatggattatttaaaaccaaaataataattatttctgtggtattcaaaatatttataaagaaaggaggaaaaccctatgacagtagggcaaagaactgtagagagaaaatggatagacagttataatatttgtttttttatttgaacatttattttaaatttatggaacacatgtacaggtttgttacatggatatattgcgtgatgctgaggttggtggtacggttaagcccgtcgcccaggtactgagcatagtacctaacagatagtttttcaaccccggtctccctccctcccttcctctccctctagcagtgtccagtttctattgttgccgttttcatatccatgagtaccctgtgtttaactcccatttacacgtgagaacacgtggtatttgattttctgtttctgcattaattcacttaagataatggctgcaagttgcatccatgttgctgcaaatagatggttttgttctttattatggctgtgtagtattccatagtgtatatgtaccatattctctttatccaatccactgctgatgggcacttaggttgattccatatctttgctattgggaatagtgctacaatgaacatacaagtgcatgtgtctttttggtatattttcttatggatatataaccagaaatgggattattaagtcaaatggtagttctgttttaagctctttgagaaatctccaaactactttccccatgggctgaactaatttacattcccaccaacagtgtataaacattccccttcttctatagccttggcaggaacttttcaataaaatatattattaaacatttttggagcttttattaatagccattctggctagtgtgagatgatatctcattttggttttgatttacatttctctgagattagtgattacgagcatttttttcatgtttgttagccacttgtgtgccttcttttgagaagtatctgttcatggttttgctcatttttaaaattatttgttttttgcttgcttaattatttaagttccttatagattccagataagagacttttattgaacacgttgtttgtgaatattttcgcccatgctgtggggtgtttgcttatgctgttgatagtttcttttactgtgcagaagctctttagttgaattaggtcccacttgtcaatttttgttttgttgaaattgctttcgaggacttagtcataaattctttcccaaggctgattttcagaatggtgtttcctagcattacttctaggattcttatagtttgaggtcttacattgcaggattataggttgctgggttttagtatcatggtaatgctggcttcagaattgcaatattttaaaactatatagcaggtattataaatattatttgaaggttgagtgttttaagttaaaaaaaatgtacagatggtactctttatgcacatcagtgcggggccttagtaaccactgtgcaagttgaaactgggcaaagttatcttaataattactggaaaaacataaacttgttcctgcaatcattaaaaacacttgtcagtcaggtgcagtggctcgcactggtaattccagcactttgggaggccaaggtgggcagatcacttgagcccaggagtttgagaccagtttgggcaacatgacagaaccctgtctctacaaaaactacaacaaattagccaggagtggtgatacgtacctatagtcccagctatccaggaagctgaggtgcgaggatcacctcagcctggtggtcgaggctacagtgagcctttttgataccactgcactccagcctggacaacagagtgaggtcttgtctctaaataaaagaataaataaataaacacatttgtcaaaatattaaaaatgtcttactgttggttatatatgcatagaaaagtaaaaaccaaaaaacaaccctaaaactagtatttacatagtacactataatttaaaacattgataattaaaatacatgttttatatatttctttgaaatgtattcagattagtttgtacagtatttgtacaacttctcatcatgtgactctcaatattttttatgctttggtgaattgccatacttctttataaatttgattatttgtccaacattttattgtttgtgcgttcattgtctttaaacatcttggagagtttcttcaatgtaattttttttctcagcatcacatcttctgggaaaactttcgtcttttccctgcaatcagcttcttcatttaagttgtaaatatgtattccataagttcccctgactgcacatatgaaatctcttggatggtagttgtgtcagcattctcgcaattaactatttcttctataaatccatcaagatccgatctgaattcactttcggtgttgacactttcatttatttgccacactttcatttttgttggctgattttctgtcgtttatcaatttttgtgtaatgtcacgtctttatcactgaaagacaaagaagcaacactactgtatgctttcctatctctgtatgaatacaaaacagatacatagtaattgattattgatagatattgagaaaagtgacatgactaatcatggatcttgatgcaaatctgacatttacctaatagttttatggactgaagagttaacagaaaaaaattgtacttcaagccattagtcccaattaatacactgctgtacctacactgttttgttttggggcttgtgctatgtaactaaagcatgataactaaagcctttgcatatcaaaactaaggaaaacaagaactgtctattttatgagccctatatcaatcattaaaattaaaacaatggaatggttaaaagctaatagtggagataaaagcggatcttaaaaactaaattttcaattcaaaagaaggcagaaaaagggggaaaatgaacaaaaatgatgagacatttagaaaacatatagcaagagagtagttatacacccaatcatattgataattgcattaaatataaattgacaaaatattcttattaaaaggcagagatcataagacaggattaaaaaccctgactcaactatatgctctttataagaaacttacctgaaccaaaaaaaagaaaaacaaacaaaccaaaacccactaaaactgtgaagagcaaagtaggcatcagaacaggaaatatcactggggatgaagaataacatttcataatgacaaaggggaaaatacaccaagaagacatgtaaataataaatatgtatgcacacaatagcattacttcaaaatacataatataaaacctattaaaactgaaaggtaaaatagtaaaaccacagtcatccatggggatttcaacagtctcctgccagaaatttttaaaatttgttaaacaaaaaattggtaagggtagagaggatcttaaaaatacaattagccaacttgatctaactgaatcttttagaataatctaaggatgagggatgaggtagcagagaaagaaaaggcagacatcaatgtgacattactgtttcaaggctatgagaatacaccaataattgtgtgtgtgtgtgtgtgtgtgtgtgtgtgtgtgtgcagatggtaagctcaatcttaaaaatgttgagttttaactgaaaattcattattaggaaagataagaggagatgatatctagtgagaggctgtatgactgaactctaagagaaaggtcacagcagaaattgtgtacctgacagctctagaaggaggtcagtcaaaagtaagtcagtgatgaattctctggtgtaaaagcagaggaatgaggattagatttaaaacacatggaagcagagtgacttatgataaaaacatgagcttgaaaatcctgcagagagggctttaaatcctgggtatgatatcctgcttgtgtaggcaatagtgataaaaacacaacaacaaagagaggtaaagagcactttcctttgatataagtaaagggcacgacttattgcacatatatatataggtattcaactgagattcaacatgtttctctcattgaaacagcaagctctccaggccttcatgttcccagtgaggtaggtacccttctgatgattatactcaccctccctcattgcaaagctcccgttgttattgtcttggctctggattccctcaaaaatagactatgaaacaaatatctggggtcagatactttaatcagaaattgagtgagaaagcacagaagtggagaaaatgaaacagaacacgaagccagtgtgaatgagtagttactgctatgtgctcagtaatgacggaggtatggagattgtctcaaaataactttacaaagagatggggatgctggaatccccatctcttattgcttaaggattaccttagaatcattaactctccacccctaactccttctttgttcctatgtgtggttgagaagcactggttagcctcaagaagcttgcaggcaggtccacaaatcagaaagacaggcatgatgtggggagctctcagttagctggaaacaggtgaatttcaggtgaacacattgagtccaggacatagaagacaagtcatcaacaatatctgctatagccagttttctttttctataacacatatactttttattgggggtccccaagtccccctttggtttaatgattcacataactcaagaaagctgattttttttgtggttatagtttctaacagtgaaagaaaccagattaaaataatcagaagcataaaagcacataaagttgagtccaggacaaaccagatatgagcttacaggtgtcctttcatagtggggacttcacactgactaattttctttacaatcatgtgagacaacatgtgtgaacttgttgccaactagggaagctcagtcagtcttgagtccagggtttttattaggattccaccacatatgcatcgagcatcctgtgactgaacttagctacttagttcccaacctccctatgccctgagaggtcatattaatatggcattacacaaagtcataggcatacagaaacaggtgctcacaagaaataacgttgttagcatcagctatttggtatgacctacgttttcaagtatacaaagactctcatcaggcagcatataccaagggctcataggttgtcatctcccaggaggttgtcaagggccagtgctgaagacctttggaatgcgcaaggttttggaaagccatgtctgcagaattaaccattacacaccttccaagaattttttttctctttaaaaatgttttttgatctttgacaatgtaccaaccaagactgagtaattagtaacagcagtgtactcctgagtacttgcacctgcaaggagaaaaaggacagatgcacttacataggacagatgcaaatagacaccactatgacaagtaaagctggaataatcaataaattcctaaagacaaagtggggctggtcagattgggagaccgctgacagctgcagaagttgggaaagatccatcatcttgaaaactttttccccacaaacccactgcgatctctcaagcaattggtaaggaatccaagagagtctgtatatgacacagatcagggagagcagaacacttgggaggtgaccaggtcttgggggctgagcccttatgaatgggattagtgcctttataaaagaagctcaatggagttcttgtgtgccttccactatgtgaggacatagaaagaaggcaccatctatgaaccaagaaatgggctctcatcaacactgaatttgtgagcatctttacctgagatctttcagcctcaagaagtgtgaaaaaagaaatatctgttgctttttagtcacccggtttatgttattttgttataagagtccaaatagaccaagatattccattccacttaatatgtaggggaagacaacaaaaactgccacacttagaatactcctgatactggaagtatgaaaacaggaaaaacaaaacaaaactgctcttgaaggtgaaggaggaatatcactgagctcaccaacacagccaggaaaagaacagaagtgtgagaaggctacattcctgagaccctgagaaaaagtacctgcataagactgagatgaaattacctaccctagttataattgaaatcccaaaaagaggaaaaaataatggagcaaaagaaatatttttcaaaataactgccaaaaatattctaaaagaagtgacagaaaatcaaacttcagatataggaaactcagagaatgtcaaatagaacaaaaataaataagaaatacatcttgaaaaatctttaagaaatcaactctaaattttatatcttgctccaaatatatagagatataaataggttagcatgaagatatggagaaagccatatcatggaaacactaaaataaagctgtggaaggacattgatattagacacaacaaagttcagaacaagaaatagtatcagaaatgagagataatagataatataataattctcaagatgtgaacatcctactaattagggtatgcagctaacaacagaacctccaaatacatgaggtaaaacaggaaagaaatcaaaggtgaactagaaaaatccaaaattatatttgcagacttcaacacttttgtcttagtaatggacagactaggcacaaactcagtaatcctatggaagataagaacaacaatatcaccaacaagacacgcaatcttcaatggcagacacgctttcaagtgaaaaaaaaaacagtatggcatattttctaacaaacccagaatttctaatatttgcggtcttccttccatcttcctttctcttctcttcttcttttcctttcttttccttttttctccttccttccccttattcttccttccctcctccctccctttttttccttcttttcttattctttctttccttttttcctcccttcctccctccttttcttcctccctcccttcctttttccttccttcctccctattttgtttgccttcctcccttttaccattctctcttcctttccttcctccttccttcctcactttttctctttctttcttgagttcttgctttcttttttctcccttcctccctcccttctctcatttcctccttttctttcttctttctttccttcttttttctttctctttacaactcatattatttaaaaaaaattaagacaggcagaaaaataaagaacactttaatctgcaggtaaatagattatgtctgctgtagacaaaataatggcctcccaaaaatgttcatgtcctaattcccggagtctaacatacaaatatgttatgttgcatggcagtgggaaattagatttcaagtgaaattaaggttccaaaggcagcgggggcaaaaagcctaggcggagggggcaaaaagccgcggcggcgggggcaaaaaggagcgggggcaaaaaccccacaaaaacccgcggcgacggggggaaaaaaccgcggcggcaaaaagcctcagcggcaggagcaaaaagccgccgcagtggggataaaaagctgcggtggaaaaaacccgtggcggcaggggcaaaaagccgtggcttcgggggcaaaaagccacagcagcaaaaaccctcagcggcgggggcaaaaagctgtaaaaagccgcggcggcgggggcaaaaaaccgcggcgccaagggcaaaaagccgcggtgacggggcaaaatgccgcggtggcgggggcaaaaagccgcggcgggaaaaaaccgcagcggcgggggcaaaaagctgccgcagcggtgacgaaaagccacaggggcgggggcaaaaagccgcaaaaagccccgacggcgggtcaaagagccgcaaaaagccccagcgtcgggggcaaaaagccgcggctgccggggcaaaaagcagcggaggcaaaaacccgcggcggtggctgcaaaaagcagcggcggcaaaaagccggggcggcgggggcaaaatagtggaaatggggtagaaggccagcacagcttggcattcctggactgtgatgtggaaggaaaagtgcagcgcaagacaaagatgtaagtaggcttgactcagtgcagctaagaactcagatgttatcttgatgttaactatcagctgattttttgtattttagtagagaaggggttttaccacattggccaggattgtctggatctcctgagctcatgatccacacacctcagcctcccaaagtgatgggattagaggcatgagccacaaagtgctcaaaaaatctattaattaaaaaagtgtatgtagccgtcttcaatctaccatgtccattagcagataaatactacaagcaaaataacaacaatgaaataaacatagacttagagtagatactctgatttaataaaaatttgaaagtagaccaaattacgattaaaaaaactctgttactattgaggatgagggttagtgtttggaaaggggcaggagaagtatcactatttttagtaatgttctattttcatacatggctataagcaaatatatgtgtttcattaatcaaggtatccatatttaatcattgtacttttctgcatgtatgatatatgtcaataaaatgtcttaaattatatacagcaaaaatagacaaaaccacaagaagacatacatgaatgttaaacctagagagaaatttgaatataagtaagtctctgaatgactgctagaacaaaccaaaaaataatcaggatggagaggtttggaacagcatgattagcaaaattgacatatctgtcttttaatataggcagaaacatagattaaaaaaggacttgtctcagagtatgatttctgaaaatagtggaatcaagtttgaatctagtaagtacatataaataaatgtcttaaaactcttatgttagctaattaagaaattattgtaatagatattagaaaatattttaatacattgagtggatttcacacgctaaggaaatgatcttacttgcatttgatagttcaattacatacatatatacctataggtagtttaaaatatttctaataaccttatatacttttaaaaagcattgatatctgtttgcactatctggtctatagaatacacataccaaacatgattatagctcttctgctataaacttcaaatgtctaattaatacaaaaatctagaatgagaagagttctttgcaattttttttttttttttttttttaccaaatagaatataggaaggatagctgcaaatatacctgacacacttatctgtgagtatggtggtagcctttttattttatttttgagagagggtctcaatttgtcacccaagatggagtgcagtcatgtgattagagctcactgaagcctttacatactgtgctcaagcgattctcccacctcagcctcctgagtagcagggactgcaggtgcatgacaccatactagctaatttttgtaaagatggggtttcaccatgttgccctggctgatctccaactcctggactcaagagatctggccaccttggcctcccaaagtgctgggattatagttttgaggcaccgcgatcagcccagccttaaaaaaggctgactagagatctttatctatgtatatctatatctatctataaaataaacgtgtttattatataaaaatatatattattaatattatataaaaattttttttcaaggtagaaatatataaagagggtgcatgtagagcctgggtcattgtgtagtgaagctcaaggcctctgaagaaatgccccttgcctcttttgtctgggctagaatccaagaagggaaagcagcagatgcactggttcccaggttcttggcatcctacagagagaaacatgtttgagctaggatagcgttaaacacccttcttctcactctcctgttttatgtagtgagcagagactagcttcatgagaacagactgtgacagtcaaggctgtctgttattttgtgcagcattaattgagaaattctagcacctgaagacctctgggccatttgagggtaggtgcagggaaggaaagggaagtttgcatccctcctgctgtggagagaacccgtgggaagcacagaccttgtcctaactaaaggcagacccccttgctaaccagcttctcatcagccaaccctgggtgagtttccatgtctatttactaaataatccttattgcttttcttcataggggcaaagtatggtttacagggaatattgttcctttgaacacccattgtgcaaactccttcctgttgtgggaaaacaggcttccatatgtgtctttttgggaaacacattggcaatttctatgtttttactgcatctatttcttggatatgggaactgaatagtgcccatcaaaggctcacctgatgttggatattgatctgagagcacggaaggacagaattctttctttgttcctgggcagccgtggttgagggatcattttgtggcagctacagtggcaatgatggaggcagaacggagggctcagtaccaagacaaggagagacttggcctcacaatggcagcattgcaggggtgcgttctacagagcatttgctcacatggttttgggcattgtctctaactacattgcttccccaataggttgacccattctaaataactccttttctctttaaaacagaaaacttcatttgtatgacttgcaattgtaaatgacacgaattggccagttatcattcaaattccctgttacttaatcctgcctttttctaacgtatgcaactttcccctaaaaaactggacacttcgttgcttattcattgtctttacacattttaaaatgttgctttatgcccccaatccctaactacattttcgatgttttgcaagtggagtccatgtgttcttgatttacatgaagctcaaaataatggttatagtaactagtacttcataattaagcaaaaagctcttattgaaaaatgacagaactatacatagagatgacaacatggagagatatttcctgagatcacaaagttatggtatggcagaactagaaagttgagtagagactctgttcccaatcattatttctaccaccagctttctattttgatgttaatagtgttcttatgtgggaaaccctacatatttgccagtgtttagttcattgacaaatataaagaacttcaagaacactctaatcttttaaaaataaaatatctataattggccatatgaaaaaaattggtacttgacatatactgagatcgttttattttgtgctagacaaatgaagtcatagaacagaatgtgctttaaatattatgaatagtgcttgcgtgtgtgtgtgtgtgtgtgtgtgtgtgtgtgtttatagatgcatattaggctgctgaaaagtttgactattctttccaggagagagactgccaacttttgaacctaattagtacaagtatattgcttcttcatatttttattaaggcaaagagagtctagttaaaaataattcaacttattgtggaaatgctataaattgctgtgaagtgagttgctggctatggcttgtcagagcgaatatattgtacaaatcttaggggagaattagtgcttatgcattaaaatcaaatcatcttgcagcacactgagaaaaaggttagatttttaaaataatttcagagtcatgaaaagagcaaatatgctcaacaaagagcctagcaaccctcaatgaccaattccccttttatatagtttggtatctgaattagaatcccagaatctacaaattcctctgggtgtgggtgctgcattttgaggattttataacactgccatcaccaagctctcttttgatattcaatttaaggagataatttacgggcaaccagagagcatacaccaaagtaggtatctatctagatagacagatacatctccatatcattgacaggatactttctggccgagcgtgagtacaacctatgggtgtggttggagagaacatgtgttccacctgaatggcagatcaagattattccttctcatctgctgcaatggctcaatgtgttaaggagaggagtgagacagcaagaactgcattcattcagtcatacagaccaaaaggaggaatgtcgcccagccctctaaactgacccagaacccagctcatgtctcaactgctacctctactacttagaaagaagtaactccgctaaagcagggttctggacaaatatatttttattgatcatatacaaatagatgaagatggacttggatgttaagaaaaataatactatacaaaatcaagagtagacagtcacccctagacttaaattaagagtgtgtacattagataatttaatccaatgtatcaggtaaaaacttgaacaaacgttttggcctcttccataaaattcagggaagcatgtcctccacaaaacagaatcaaaatataaatgaaagactggcttaagatgaaaggaaaccttataaatgaaaagaagccagatgagaggcacttaactgagaatgaaaaaaaactgagtggacaaaataattatgagaagatgaatcttcaaatcagaaagagggaaaaaagctcatttgatactatgggaactcaaaagagagtgaacacaaatgtgaaaattccaagagtacagaaaagtagcataactaaattaagagcatgagaaaatgtatacaattctgagtaataagaacagaaatcaaaagttagtattgtatgttttagtagagcaacactgaagacgaatgaaaacaagaaataatattaaatatgaacatatggagaacagaacaatatttttaaaatttttagtttctaagtttacctgaaattttaattttggtttcttatgtaataccagagttattaggaagatattagctaataacactattttcagtggtattttaagtatttgtcctagaaaaatttctattttttaaaaatgtatatttaaaaatacattaaatgtgtatatacatcaatcatatgtatcgatttctgttttttttgaattgcaaatgaaatttgtatttttgtgttcctggaataaaataaacttgaatggattgtgatatattattcatgctgtaattcaatgtatttgaattctttaagaatgttacatttatagttaacagatattgacctataaattttctttcatataataatgctgtgagacaatataagaagaattaaaatttaaattcatgtattcctactttttcctctgttctctaactgtaatatattttaattacagatggaggaacagatagatgttagataaataggtatataatagatcatccaaaattcttattgttttatgtagtcagtatttacctctgtttttctacatgtttatccttccaatttagttcattactttctgcacctttgatgtcatatacataaacaggaaataacacatggtggccgggatgtagagagagccacaggacttgtgaatacaatccacaggcaaggatgtggcgattccttttgcagtattggagggaatgccaaacgctatgtttgctgtggaaaagagtatggtagttcctcaaaacatcaaaatggtattgccatatgattcagcagcgccacatctcaggatagcaaaagaattgaaagcagagtcttgaaaaaatatttgcacatccatgcttgcagcagcgttattggcaatagctaaaacgtagaagaaattgaagtgtccaacaacagatgaatggataagcacaatatgatatatacacacaatggaatattattcagccttaaacatgagggaaatattctgacatatgttgcaacttggatgaaacttgaggatattatgccaagtgaaataagttagtcagtgaaggacaaatacagtataattccatttgtattaaagtggacagaatcatagagatagtacaatgatggttgccagaagctgtggggaggaagaaatggggaagtattgtttaatgggtatagagtttcagttctacaagatgaaatgagttatggagatggatggtagggatggctgcacaatgttatgactatatttagtaccactgaactgtacacttaaaatcgttaacagagtacattttattttatgtgtattttaccacaataaaaaaataaaataccttaggaacattttcctgaaagagtccacataaaattcattttaatgcatgtgtttatgcatagctttctatttttctcttttctatttatattccaaattagaatataatgctaatcaagcatagtggctgtgtttcttgcttcgtctagtctgcaggtagcatacaaatgtaataaactacttattcatgtcacatctatttattttctgccttataccaagcttgtgggattctcttaaatacaacatttttatacttacacctaggcaatacccattagcatcgccttcctaaatcaggggaaattgagcctctgtaaggtggagtaacttactaagatacaaaactcagcattaaagtctgtatacttcaatatcctgccctcttctcatttgtctttactgccttttatgtatgtgttagatgttcaataaattctcttttttaaactgaatttaagccgtggagcagtgttttgttgaacaataaatatgatataggacactcttcctccctttcatttatgatccagttcatgaaaaagagaaattctttcattgtgctagaagcttaaaataatgaaaatgccactttctacattaaacagaaactgaagggaatcaaggtgaattgcacgagacatagaaaacaagtgggaaagaaatctagtataatttgccctttttgtacctttattatttggcgtttgagtaaatgtttcccccaaatatcttcccatcttaattcatgtctatgaagtagacatttatgtctcaccttgtcaagaagggcaaactctaacataaacatttcccaaaaatgctttctgctaaaacgtaagctcagtctggctagaaatgaagctcacttcataaagattaattggtagctaatctttgcatgctgttctctgaacctgagtgaaagctgtccatcaggcatacagggaatgacggaaaaggtgacaacagaagatgaatgctatgtcactaaccttcaaagatgacctgccttttctttcaaattcttgatatcttaagacttcattatttcatctctctttgcccttggttcaacattgtgctataccaaaactcatgtaaaacaatgatctaatgtaataaaaatggcatttttctttcatgtagatgcaagctaactggcatttttacaatcaacgtatttcctttgtcaatttttcattctgtattggaagtaattgataggtatttctgaagggatgaaggtgtttctgtgttcattgtgatccaaactatttttagacctaggggcatttgtaaaacaatttgtgccagctgaccaaggaccactgtggcagaaagcagcaaacttgcataagatgtcactgcctcataagttggctttgaaaactaggggcttactctatagtcttatgaatcaaagacattgatagatgtagtataagattacaatcatattttccttttgacagtcacattataaagcatgatgtattgcaattaatctcaattagctgatcacaattaaaattaatgtttattattgctgataaacaatcatgaatctcctgttctcaaatgtgcaagtaattcttgtaattttaatacaaatttgcatattattactaattgatttaatctcattggatttggttcatggatccaatttattaaaatattggtaatgggataatgatttgtctctccatttcatgtacgctaaaagccacaattcttacaatggtctgcaagcccatcatgatccgctgcaggttaaccacgaaaattcttttatttcttcacccttgatcttaccagtggtcctggccacctcactgtcctctggacatgcatgtttgctgctgtcttatgaccaagactctagttaatttcttggcttggaaagatagccctccatatatccattgatcagctcactcaacttcctcaagtctttactgaaacctcacattctcgatgagacctattcggtatttcaaactgcctcccagctgcaacattcccaaaccccgtactcttctgtgtatttttgaaaggatttattgagatataatttacatagtgtagagtgcacacattaatgtctacaagtcagtggcttttagtatatgcacaggtaagtggagccatcatcacaatgaattttagagcattttcttcacttcaaaaagaaaccccaccttctctagctgttaacctcctatgcacccatcccctactcaatcctaagcaaccacaaatctgttttgtctctatagattttcctattctattttcatctaaatagaatcatacaataggtggccttttgtgcctggcttctttcagttggcataatgctatcaaggttcatatatgtattggtactttatttctttttataactgtagaacattcaatttcatggatataaaattttgtttatccaataatatttttattgacatttgagttgtgttcagcctttggctattttaaatactgctgctaaaaatacttgtgtacaatttgtgtttgaacacctctttccaataatctgggtgtatacctaggaatacatttctgggtcatatgacaattctatgtttaatatatttagaagccatcaaactgttttccaaagtggccagttctagccatagagtatctaactgtggttttgatttgtagttgcctgatgagtgatgctattgagtatatttttatgggattattggccgttcgtgtaacttcttgggaaacacatctattcctatcatttatcagttttgagttgggatatttgttactgagttaaaacaatttttctatattcaagatacatatatatatatacagacatatagacacgtgtttttcaaatatcttctcacaatttttgagctgccttttgacttgcttggttgtcctttgaaacaccaatgtctttaatttttaagaaattttaaatatctaatttttattttgttgctcatgtttttggtgttacagctatttctttgctagatccaaaatcctgaagattttcccatatgctttattctagctcttgcatgtatgtctttaattcatttgagttaatatttttgtatgctttggggtaagggttcgaatttattattttgcaagtggtgatccatgtgtacgttgttgacccagcttgttcaagactgtctcttcctcattgaattgcacatggcaccactgtaagaatccattgactatagatacatagttttatatatggactctccattctcttccatcaatctatttttccttcatcagtattgtgttgtcttgattactgatgctttgcagtaaggtgtgcagcacgggggtgtgaattatcctattatgttttcttttttcaaggttattttggctattttgagtcccttgcgattccatgtgtattttagaatcagcttgtcagtttctagacagaagtctgttgggatacttttagggatttcatcaaatctgtagttcaaattgtaaagtactacaatattaaatcttccaattcatggctataagacatttgctaattatttagatcttctttaaacaataatttttaattttcagagtaaaatattgtatcacattttccaaattaattattatttcttttttgacgctattgtaaattgaaatgttttcttagtttcattttggggttttcattgtagatgtgtgcaattgatttttctatatttatcttgtatgctgtaatattgctgaaataatttactagttctgtcgttcagtggattccttaaaattttctatatacaagaatgttatttgcaaataaagttttatttctttctattcaatatgggtgactcatttctttagttgccgatttgccatgcataaaatctttagtataatgttgactagaagaggtcaaagtatatatcctattcttatctctgaccatagcgggaaagtatcctttcttttaccattaagttgcatgtttgctgttggcttttcacaggtgccatgtatctggcgtagaaagttctctattcctggttcattgagtttttatttttatttttaatcattaaagaatttggattttgttaaatgtcttttctgaatctatcgagatgatcatgcaattctcgtttcttattctatggataagatatattaccttaatggattttgggctgtttaaccaacctgggattacttgtataaatttcactttgtcatagtttataattcttttatatgttgctagatatgatttgttagtattttttaaggaattttgcatttatacttatagtagttttatttttctatgctatttggactaatttttgtatcaaggtaacactggccccacagaataaattgggaagtgaatatttctcttttttaaaaaagctagtcaagaattaatatcaattattcaatactaacaaatattgttataaattattaatttctctaatttttattttcttccttctgcttgctttagttttgctattttttccagtgccttaatgtggaaggtcatcttatctcatcctttcatttgtcttttcattttctaaatagtgtctttttagcatcaggtgagctccccaggttggtagtactccatgtttattgctgtacaacaatgacaggtaatatgtcctgaagacaatggaaacttaacattcaaaatcctcctagattccaccttatatgatatgtctcttcctttaattggtcctaatttctaccctttctctattataaaccatgagtacaatggcattcaatgagttctgtgagtctttctagtaaattcttgaatctgagggtgttcaggggaaacccctgaaatggcagttggtgtcagaagtgagaatcgtcttatatggcctcttcctttgaactttgcagctggacccaaactctgcataatttgggccagaagtctcgtgttgactttgcagcctaaagtaccttgtagtttgtctaaccctcaataaatttgctttcatcaaatattgtatttgttaccgcaaaattaccatcatgttttttttctccaaataactaacattgggagaaatagccagctgaatctgtaactcaacagaaacaagtgatccatataccatataccatgtaagtggccattttgcctccttccaccacatcttagcaacctcaaccattgccatgagccactgtaggcctaccggctacaaacaaacaagtatcttttaaaaacacttcatactcccatttgataaatttcccagcaaagagatgtctactttaactctatgcaagtggctcatattcacgaagtctggagatattattcatgtagtgtgagaaaatcatcccagcgatgccagcacattctccttcccataatctgcttagtttgcaaacatattcaggccataggtgagagatttgtatttcacagtacaacaattttatggagggcattgaaacttagattgagcattttagtacagtcacacatcactgaatgatagggatacgttctaacagatgcatccataggcaatttcatcattttgcaaacgtcagagagaatattacaaacacctagattgtacagcctaccacgtctgggttatacggtatagcctctctctcctaggctacaaacctgtgtactacattactgtactgaatactgcaggcaataagaacacagcggtaagagtttatgtatctaaacatacttaaaacatagaaaagcatgtaaaaatatgtattataatctcataggcccacttttgtatatgtaatccatctttgactgaaatgttattatgcatgacatgactctatgacaaaaataaaataacacactgtaaaaaattacatatgtatcaaacatattaatataaaaataaaaatattcagtgtaagaatttgtaatgatcacaaaatgttcacagcttatattttagtacagtttcaaatgcctagtgcaattactatttatttgtgtattttaaacatgtatataataaatatttttcaggttcaacaatgtatatcaatccaactggcttttataaatattagttaaaatcaattagtaaattcatatatatatacacacacgtgtatcagtgtgtgtgcatgtatgtgtgtgtaaatgtaattgtatgtgtgtgtaaatgtaactggatgcatcctaatatttagccttacctacaagatttccaagattcatttattatctttagatgatgtgcacttaaagatttgccaaataaaactgtaaccgtggaaaatatcaagatgttattaaattcatcttgtgcacgtaattgtttctctacatttatgtttcttgcacaacttgcagtaatgctcatgcacaaaataattttctaaataaaaaataaaaacattttctcagtcattaattcttaataattatttctctctgataattattgtgaattaattcttaattcttaattatagaataatgttgcctttcagagttctgaatcttttgcatgttgtatacatttcactaactagaacaacttctggaatattggcattaattaatgtcactcagcaattattgatttcaaagaaattaaataccattcatattctgaatcacaagggtgctttggcatctaatttaatcaagctctttgtatcatcatctacactttaattacttaacaaacatttctctgtgtgagaaagattgagcaggttattgtgctttgttaagatgcaacttttgcttaatctagagataggcaatgctctctataagggacaaagagaaaaatgaaagagcaatagagacgtgacaggcatggaaaaagacaatacatttataaaacaaataggaccacagatgacaataatggggatcaaatcttgagatactgactcagtttataaccgcactgtataatagagcaaatcacttgttaatttttttaaaaatggaatttaatttaagatgaatacagtgttttaaacaagacaggtcatcttaaaataaaatagtggaataaagtgataaaaccaatgtaaaaatcataaacaatttataaagaatttttgtcatgtaatttaatatttttatttaaaaatcaccaaaatcagaataattttatcttaattaacataatcatcagaagttaactaatttttactttataatactacgtttaaaaatctttatatttttaatcatatatgcttatatataaaatagacataggatatatatttaatgttcccaatattatattgcaattgttcctatggatgtggtttttcaatagaattaagtacttttaaaaagtttcaatctcaatgatatatatgtttgatttttctttgacaaagcatacatatattgataggtaataatatgaaaatcttctaaagacattacaggaacatgaaaatgtaattaaatactcactaatttgtaatgttttatgtaagcggaacacatttaactgaaaattgcttttatataataaacgagactagaaacattttaactaacggagtaagtcttcaaattgataatctgaactatacaagaggagaaacttcaggcactcaaatatttgaaatgatacaaaatatttatataaactattatttaacaatttctgtttgtagagtgctataatcaatataaatgacatctcaagtctttctatcgctttgaccacatttacctcctaattttaattactaatatgttggagcaatgcatacaactagattctgatcttcctttttaatgagtaaaaaatatgtcctttgagacagcattaaagaaagagcaccttgtataaattcaatgccaagagacaagatattcttgattctgaagtcttgttcttttatacaacaatgtaattaataataagaagaaaagcaggacatagatgtggagtctattttaatcaaaaattgtctatagattttgatgataaaatttaaaaatctactatatttagtcagttacaaaaaactaggttgtgggaacatatttggtcaataaaacacccctaccaaatgctaacaagaaaaagttatgtaccacctttcttctctgcagatggcctgagatgggttaatttgaaagaatgtttccaaacctgaggtgacccctgagaacagcataatccactgctgtctcccacattcagtttctcagtttgtgctcttttaatcttggggggagggaagccagtcctttaaagcaatcttcagcatgatggcagagccaaggagtgtggacaggtggcacggtgtctgacttagttccagcagccacttgggtttctctgggttttctctgccctagggatagcaccactattgaaaacatgtctttgtgacattctctatgccaggaactcccaacacattttccttgaaactgatgaaatgaataaaaataaaccaagaggtgtgctgtttgtttctgcttcctcctttctgcagcccttcttgatcatctaatatttttaaatacattgtcgatcaccaaaaggagcataaggggtatattgatttgtagctgatgtattaatagccgagcccctattccttacctgtagctgctgggaagaaaaccattcttaacactctacaaggtctcatctccagaatttgcacctgtttctagctgaggactttctctagcagcacgggagcttgatactgggcatgaagtgggaagaaaaggtgagggttactaagaagaatctccctggattcagtgatgtaattctgaggcatgttccacatagcttcccatagaattaagcccagatatctaacacaggaacttgcctgttaacacgtgtggtactggcttttctatctttcctgttttattttattctctcttccttgtctcactttcgctgtgtcctcactcctgctttaagaatacccaaacaaatacattcatttatttttttagactctcagaacacagttgatagttgaacttgtaacctatgataatcagcttggatgctatactgaaaggaagatggtgaactcaccatgtctaattaagataaaatttaaaaaatatattgattcatgtccaaagatttaaaaaacctaagcggcagtgtcacaatttcttctttttagtttacatggtttcttaaatgcctacaattattttaaaggaagccttgggtttagagaaaattgagacatacggaataaattactaacccatttctccttgaaatccattagatgctgatgatttttcacatatacttctgaattgaaaagctagttgcgaattatttttataagcatatccttatgtaatattttgtttttaacagtaagttgaagatttaaagattaaattattctatccagagaataatttaatctttaaatcttcaatttactgttaaaaacaaaatattacataagattttaaaacaggtcccatattcttttgagtcaattagaatatgtttgtatcagtctgtctacagttttacacctgtcaaaatgtacttgaactacaagtaccttgaacaattttcacatttattattcctctgaaaatgattaaaagaattagagtgaaattctgattggcataatttgggagagaaattattccttggagatcaacctctgccaagatagtttataatgacattgagactttttgatttacaaagtttgttatataaaaaatactaagacgatgacagataatacacacactttaattaaaattgtactaaaattaaatgtctaaataaattagaagggtacgtggtacatctaattgtatgtttatatatttcatttgtgtattttattcctagggttgcttttgctttagtttgtaacacgttcttatttttatgataatgtagtatatgctaaataaagaaaaatcaggaaatagaaaatgaagaagaaaacattagctattgtcaaccaaataaaaattgtgcaatctctaagcacatgaactatgtattatttgtacagcatgtacaatgtttatgcttcacagggtgaggtagagactgcaaaacattgaacctgggacaaataagaaagtaaggaaattttcacaatatattaatattatagaaaatgttgaacttaacagttaagatacaagtagtgaaaaatgatagtatttaaggagatctagaaaatttaatctatatctgtaatgtgtgagaagtattagaataatgcttgtatttctggattggcatcgatttctattgagactggaaacataatagaaatgagggaaaaagaacttaaattgtggatacttgagttttatacctaggagtttgagaaatacattttgttactatcaaagcagttggcacaagagtgtacaaaattccctaattgtgtcaacgtggagaagacatagacaaacagagaatagcaaaatagaaatagcaaaaaagcacaaataaattttacctgtatttttacataaaagccaattagagtaggaaaacatgaaatttgtgtttaatcaaaatttttctctttcttatagtctagtggattatattactggaaaaaaattgaagcattggtatgttcacaaaaaaaagtaaaatataaggtcaaaaccatgggaatgcagggagcagacaaaatatacctaaacaccgaaactgattttgccctacggacatgtaccaaaatgaatgagtgcagattcctactgtcatacatcacataggacagtaaagaaatacatagtttttcctaagatagggcatcacacaggagctcctccctaaagctaggaccaaagtttctatcctcagtataaagaagaatcagaggtaaattagtcccatttcacattccctggaaatggcaaataaaaatgattgagattggacagatttaaagaaattcaatcattaatgatttacagcaattaatttaaaaattgtttaaatgtgcagtccaaacatatgtccaaacacctttaggccaagaattaatataatgtggtcccagaatggtggtgcgtttagtagactcacaaaaaaattcaaattctctttggcaaattttcttcttactaatccgcaaaagtgcacaaaaataattttcagagaaaaataaatatttgtcattcagaggcatctaagtacacaaggaaatggtataccaccgtttgaaaggaaagcagaaaaagagtacaaacagatccacaaaggttcattagtagaaatatcactgttagattataaagcacatttgctttaaaaaattttttttaaaaaagaatatattttaggagactaaaaaattgatgtagaaaatttgtaaagtagcttgtataaaaatatagtattttaaattaaaaactcaaaaatgaactcatcagattagacatggccatggtgagagttaataaatatttcacaatgcatcacagaaaatttaaaaaaatgcaaaatgtggacagaatcatgaagagacaaggaagataccgtgagaaagtgtagcatgtgtttagtgagtgttctcatagaagaagggaactgggaagggacaatatgtgatggtattttggctgaaagttctctagacttttgtaagacactaatccgcatattgaaaaattccatgcatgctaagcaagctacaatggagataaacctacacctacgtatctcctagagaaatagcaaagaatcaggaagggaaaaatatttcaattagcactagaaaaatcaaattacctttaatcatattgaaatcggaaagaatgaaaggtaaaataaaaaatattatttgttaataataataatgccattctgaaattctcaaccaagaaaaatattcatcaacctatggctaaataacatatttagagagaaaaaacaaagcaccaccagcagaattccactaaagaaactaaaaagaaactctgaaaacatgcttcagaaaggttgaagttctgaaatcaaagaatgaatacagagcaaaataaacatacaggtagatctaaataaaaaattaggtgttgaaacaaaaagatatttaaaattagataagcactgcaatatgtatgttaggaagcaaattattagggctgaagtattcaatgaccccttaattgtctgacaagagcagaaaggtgagtatgactttgcaacttttttttttttttttttttttttgaggaggagtctcactctttcacccaggctggaatgcggtggtgccatctccgctcactgcaacctctgcctcccaggttccagcaattctcctgcctcggcctcctgagtagcggggattacagccgcgtgccaccatgcctggctaattttcgtatttttagtagagacggggtttcaccatgttggtcaggctagtttccaactcctgacctcgtgatccacacgcctcggcctgccgaagtattgagattacaggcgtgagccactgcgcgcgaccgattttggaactttaataaattcagtggacattatgcatttctctgttgtatctatgaaaacaataaaaataaaagtcataatttaaaaacaagaagacagaaactgataggagaaaatgacacattatatacatatatatatacaacaaattaataaaacaaattacgtataaatgatcaaagattaacttaaacctaagtagacaatgtttttgttaaaatacaaagattggcaaaattaaaaaaatccgtctctatcatagttacaagacaggcaactaatatataaatttacagaaactttgaagttcaaacaatacagatactgtgtatatatgatatacatacaaacatactacatgaatataattttttaaaaagttgctatgtagacaaaatagaatgtaagttagaaacatttattaaaataagttagtctaaccagtgtgataaaagttttaagttattaagaagatgtgatgacttaaatgtgcattagcctgatacatatatacatatatacacacacaccacacacacacacacacacacacacgtatttagatagtcaaattatataaagcaaaaatatcagaaagtaagtagaaatggataagcccccaaatcattagacatttcaaacacacatctttcagtaatagataaaagaaaaaattaaaagagtaagttttaaaagaagctagtggattttaaaaagggcaaatgttatataaggaacatgaatattataattcatgttattttcatgttcatacagaatacttacaaaaattaacattttctagaccataccacaaattcaaacaattttcacggaaataacgtgacacagaatatatttcctaaacaaacagcaatgaaggtagatatcaatacaaaaaagaaagctagaaacataagtctaataatattggttggaagctgttttaattaatattgaaatattttaaaggtgaatagtcaacacaaatgaaccaaacacttttgtaaggccactaagatgcatgtgtaatgtgtaatgcctccttttataaggagtaaatctgtaacatcacctgggctatttgacaactgcaaagtgaatgtgagaaggagagaaacagtgagagagagagagagataaaaccagtaaaataaacataaagaatgaaggagatagccgggcgccatggctcatgcctgtaatcccagcactttgggaggccaaggcaggtggatcacctgaggtcaggagttcgagaccagcctggtccaacatggtgaaacccactctctactaaatatacaaaaattagcctggcatggtggcatgcacctgtaatcccagctactcagaggctgaggtgggagaattgtttgaacgtggggggtggaggttgcagtgagtagagatcacgcgactgcactccagcttgggcgacagagcaagagtccgtgtcaaaaaaaaaaaaaaaaaaaaaaggaggaaatagtacatgaaaaagcagaattaaagcaactgagtatatatttaaaaatgcaacagctcactttttcagaaaaatattaaaatattaaatctaacaaatatctaggtagactgatggagaaaaatacagaaaatgcacaaaaaaccaattacctggaattcaaaggttacaaaacgtaagcagttgtaggttttaaataagcaatgactttgagttcaaccatgatggggtatattgaaaagaatctctcagaaaaaaagaaaaactgttataaagctatgtagaaaatgttaagcactattaaagtcttccaattctaccagttatggagttattggtcttggactaactctcctgaaaagaaaaaaaacaaaacaaaacctaaaaacctggataaaatggcctaccgtgggcactggcaatgcaaccaagcaggtaggacatgggtgctactttctctttgtcagaacacaaagcattcatacactcttctcaccctcactctcaccttttaatcttagatctactattaaatgtattcaactactatcaatcctttggtcaaaatttcttttctcacattttgcttgatgcacttggatagactgttcaagaaagtgtgagtactgaattcctcaaactcttgcatatttaaaattacatttttgaaccttgatgcttgaagtgtagcttgggtaacaggtgggctttaagccgattttggcatgcaaggggttgagtttattaggcatcagcacctctgaaaatcgtggggatgcaggcttaatttcaacactattctaaatacttgaaagatatataattccttaataaactcctttgtctacaaatggttcacattaactcaatatccatgattaaacatctataaaatcaaggcactgttatttagtggagacttgctggctattctatgagaggaggtattgttattttaatctcatcctctcataaaagtgtatcatattactcataaccagcccttcatattctattcctattttggtattttaaaataagatatctttgaaactcttgaattcaaatagagaatctgaatagtttttaaaatgtcaatgaaatgccatttcttcatgcttcaacaactaaaatttgactaaagtgcttctcttcaaactttctgtaacattttttaatctaaattctaagaacgatcacaataggtttcaaccacaaatgtgagaatattgtaaatgttcgggtggaaaaatttttaaaataattttgtagtaatttttgaatcatagtgacagtgcgctaaatttttttaagtcaaatattactgtagacatttaagtcaagattctaagaaactgttctaaagtccaaaatttagtttcatatacaatgatattatatatatatttgcatataaaattaatatatgtgagccatgtttcaaatagttgagagattatatcaaagattcttgattatataaaatgccaattacttataggcacacgtgctttaaataattacaaaggcagctgtggttgattctactcttgctactggcatttatatggacatactattatggtctgaagaatatttaggcaaatttatccctcatacgatcagaagaacaatgcacgatagtttatatctgaaaggaaaaaaaatctttatatggttctgaaagcctaaatcattaacaacttggataataattagcataaaaatacacaaacatgccctcttcctagcggtaagtacagagtgacaacagaatcaaagcatgtggctatgtgcatgtttatatttcaagacgcagagcactctattcctcttctctgccctttctagatggcacaattcctcatgaatctaagtgctgtcatagggtggattagggtgacctgccatttgtatgcaaccgatctctattttggaagtaattaatgtaaaaatatatttttaaaagataatttcaaatttcagggcaaactagcatggtttcacccctttcctttgtaacatttttcctaaggttggaaaagtaaggtaggctttagtacgatttttaataacaagttttcaaagtgagacgcaaaatggtggcgccaacacatttcaagtctgctacattttgaatacacttattggagaaaagaccttctcatcatttttctcttacaggaaaggaaataacatgtacagttgacccttaagcaacaccgaggttggggtgctggcccccctgcacagtagaaaatccactaaaactttgactcctccaaaacttaactactaatagcctactgtaagccttacaaataacacaagcagtcaattaacacatatttaatgttatatgtcttatatactgtattcttaacaaacacgccagagaaaagaaaaagaaaatcataaggaaaatatatttactagttattaaatggaagtagatgatcaaacaggtcttcatcctcatccttttcatgggcagggtgtggaaaaggatgtagaatttttggttttgctaagtggacccgcacaattcaaacccctgtggtgcaaaggccaactgtatagccactgaatagcaatttatttctagaaattaacctcactaaaatattcttagaaagatgccaagaaaaaaatgaataagtatttttggtacatctatttcatcatttcatttcctcatttcatcatttcatttcatcatttcatttcatcatttcatcatttcatcatttcatttcatcatttcatctcaacatttcatttcatcatttcacttcatctcatcatttcatcatttcatttcatgatttcatctcatttcatcacttcatttcttcatttcatttcatctgaacatttcatttcatcatttcacttcatctcatcttttcatcatttcatctcatttcatctcatcatttcatctcatctcatttcatcttttcatctcgtcatttcatttcgtcatttcatcttttcatcccatttcatcatttcatcaattcaacatttcaattatttcatcatttcatcatttgacttcatcatttcataacatttcatttcataatttcatcttttcttttcatcatttcactttgtcatttcattttgtcatttcatttcctcatttatcatttaatttcatcctttcatcattttatctcatttcatcctttcatttcattatttcatcatttcatctcatcattgcattttgtcatttcatttcatttcaacatttcacttcatcttatcatttcatctcatgatttcatttcatctcatcatttcatttcgtcttttcatctcatttcatcatttcatcttttcatctcatttcatttgatcatttcatcaattcatcatttcatcgtttcattatttcatcatttaatcatttcacttcatttcatcatttcatcatttcatatcatttcttcatttcatcatttgatcttttcatttcatttcaccatttcatgatttcatttcatttcacttcatcatttcatttcatttcaccatttcatcattccatcatttcatttcaccatttcatttcatcatttcatttcatcctttcattatttcattgcatcatttcatctcataatttcattatttcacttcatctcatcatttcatcatttcatctcacgatttcatttcatctcatcatttcatcacatttcatctcatcaattcatcttttcatctcatttcattatttcatcctttcatctcatcattcatcatttcattttatcaattcatcatttcatttcatatttcatcatttcatttcatttcatcatttcatcatttcacttcatcatttcattccatcatttcacatttcttcatttcatatcatttcatcatttcacttcatcatttcatttcctcatttcatttcaccatttcatcaattcatttaatcatttcatctcatttcatttcatcatttcacttcatctcttcatttcatctcatgatttcatctcatcatttcatcttttcatctcatttcatttaatcatttcgtttcatttcaccatttcatctcgtcatttcatttcatttcatcaattcatcatttcatttcattatttcatcattacacttcatcatttcatttcatcattgcatatcatttcttcatttcatcatttcatcttttcatttcaccatttcacttcatcatttcatttcctcatttcatttcaccatttcatttcaccatttcagttcatcatttcatttcatcactccatttcatcatttcatcattttctttcatctcatttcatcatttcttcatttcatcattttatttcatcatttcatttaatttcagtgatacatgtattcaagtgctaatgtgatgcccaggagacaccctatttccctttgtaaaacacctccttcaacaaaaggcaacctctcatggctggctaagtctacagggataccagcctctcttcaaccacccaatttgatttagaacctcaaacagcacctcagtttcataaaaacctaaaacataaaacacaacacttggttgtaagtgagccaacagtttgtctctttctctgcccaaggcttaaggccgtgtttccccaactacgttcagtggaagaaaagatcccctggacaaataagtttgagaactgttgttgcaggacttctcagaacctttaaaacacaaatcctcatccggagggatcttcaggagggagatgtctgatgcagcacaactttctttcacaggagcatcctgcagaatacagtatgagatgcagaaaggctgcaatgagtctttttaatggcccgggccttggtgggggtggggtaggagctctccagatagcatctaatgagtaggaacattcaggttgcttttttttttccttattggcaaacctgtgtgcacaccatgaatgaagctgatctcccttatccatatcaaaactaaacccaaattaattggctaaattgggaatcaacacctccaggagctacgcagaagaaagccccaccacactttaaagtagcttacctcatatttgacgaaagcaaaacacttatgaccagtgtgctgctaatacaagtctacagataacgctgcatgaaaaattagttttcccaatcgtagctggcatagtccacattttgcattacactttccccccttgttttaaattttaaacacaggtctttttctcttctttttttaaattttaatttaattatacaagacagagtctcagtatgttgcccaggctggtcttgcactcctgagctcaagcgatacatccgtctccgcctcccaaagtgctgagattacaggcctaagacactgtgcccggccttaaacacaaatcttaattcattcttacagttatcctgaggttagaaaaatggaaggggaagaaaaatggcaagcaggtaggttgacttcggcttcattatttgaaaggacagtttgctcagttaaaacacactactgcccacaaaggccaagacaacagaaaaatacagacatataaatagattttatatgtgacagcagtttcaatggagactttttcaatgcaaatgacaaacagctgtgcttgggaataaatgacaaggaattttttttatctcaacagctgtcctgagagcacatctctacatctctacctatattctggaatcagggagaaagccaaaacggatgacaagatactagatcagccgtgtccaacccttttagtacaaggacttttccgcctatctgtggtggtgggtatcatgaaaattatgcacaaaccttttttttttttttttaagctcatcagctgtcgttagcattagtgtattttatgtgtggcccaggagcattcttcttccaatatgaccccgagaagccaaaagactggacacctgtgcactagatcaaaaggctactccttctggaagcaattataaagaatttctgacattatcttgacatgaaaaccaatggatagtgggacagaatgcaaaatcttcaagaatttttcttgttggtttttttttttttttttttttgagtcaaggtctttctctgtggcccaggctggagtacactggtgagatcacagctcagtgcagactcaagtgctcctcccacctcagccacagtagtagctgggactacagatgcgcacaaccacccctggctaatattttattttttgtagagatggggtctcactatatagtccaggttggtctcaaactccttgactcaagggatccaggacaggataacaggtgtgaggagccaccacacctggccatgtgcatgaacttttaagacaaacacaaggccccacaaaagttaaggttttcccacctaatttccaggggatcttttggtgcaaagctgagaagcccttaaaagtacacagacaactccaaagattcaagagagttcattcggggtgagccagcccactgggcagactgaccttcaaaaaaggcccacccatgacacacaccagatggctctccaagaatctcttcagtcctcagggtccctaaggcactggacagagctaggaaagcaaacccatttgcttctccctgcaggaaaccccttgaggtcaagaccccacaatcagacaaggatggagtggctcaccttcagtcaacaggccagactcaaggtggtataatgtcttaaccaagggtgcagtcctccaggtctgactcccaactcagttctcctttaataaccacactttgttaattctccttaacaggagttcctgacaagtcagttctccctcagaccttcagtggcctcacctagaagatgagagggctggatcagatggaaattcggggagtaagggaatgtcggcacgcagcccacctcccccaagggaccctggagcctccatcccagttcccaccatgcacccgccccacaaatcctgcccaaggtgagggctggtcccgggtcctccgggtgccgcaacagcgagggaaggagggaggggaagcctccaagggcgcgacgcaggctcaaggatgcaactcggccaggagtgaactggggacccgagggaggtatccgggctgctcctcgagcccagcccgggtccccgaaccccttacctccagggtccgtatctcctgctgggtgaggccgttggacacagcgcacttggtgcgcagcccgtgcaggctgccgatggagatgccgatgagcttctgtagctgcccgcactgctgcagcgtccggctggccgcggcccctgcgccaccccatcacccccgcccccgccctccttcttctctcccatagcctccccgcgcagcgccgctctatgcaggccacagtggccaaggcggggagcccggggcgcgggcgcctaggcaaggaaccccggagacgggagagctggaccaggagcgcccctcggcggtgcccttaccaggacgccagtagagctggcagccgagtctgccgctcccgccctcagaaccgcggcggcggggacaaaaagccgcggcggcgggggcaaaaaggcacggtggctggggcaaaaagctgcaaaaagcacggctgcgggggcaaaaagcagcaaaaagccgcggcggcggggggaaaaagccgcgggggcaaaaagcagcgggagcgggggcaaaaaaccacagaaagccgaggcggcgaggggaaagagccgcggcggcagggggcaaaaagctgcaaaaagcagcggcggcaaaaagccgcggcggcgggggcaaaaaaaccgcggcggcgggaggcaaaaagccgcggcggcggcgggggcaaaaagctgcaaaaagccgcggcggcggggacaaaaagctagggcggcaaaaagccgcgctaacgggggtaaaaagccgcggcgacaaaaagccgctgagagggggcaaaaagcagcgggagcgggggcaaaacacaaaaagccacggcggcgggggcaaaaagctgcaaaaagccgcggcggcgggggcaaagagcctcggcggcaaaaaccagcggcggcggcgggcgcgaaaaggcgcaaaaagccgcggcggcgggggcgaaaagccgcaaaaagcagcggcggcggaggcaaaaagccgcggcggccggggcggaaagccgcaaaaagccgcggcggggcaggggcaaaataggagaaatgaggtaggaggccagcacaacttggcattgctggagtgtgatgtgataggaaaagtgcagccaaagacaaagaaagatgtaagttggcttgactcagtgcagctaagaacccagatgttatcttgagggtattaactaataagcagtttaaatcagaatggcacattctgatttgttttttatattcacatttggcaggcatagatactgtttgaagagagtaaagtcagtagatagaggtaacaaacttaaatatgtgccaagtctagaaacaagagactagggggataaggacctttcaaaagaaaatgcaagatttgaaaactgattggctgggggatgaggaaaaggcacgtctttaaggtcaatccctgttttgctttaagttgttagggggtggttttatcacatattgtagaatatgtcatttcagttttgaacatcttgagttaaattgtcctaacatattttatgaatttgattttcttccctgggaagctagtatttcaaaaacttaaagagtatagatttccaacttgtatccaatttataaaactatctctaggctgctggtttcaggaggaggctcatgaatattctatttgcagagaatatatcaggagttaacaacagcgtcagtatttgtggacgaccagttaactaagccacctcttagtgtatttagataggaaatcttagctgaagatattcaataatgaaccaacagtgactaaaaaattcaatatttaagtatatttcattgcaattaatttgaatttaagtagccatatacagctagtatttactacattgaaaaatgcaaacaagaggaaaaaattaataaccatccctaataccacatgccaaaatcctcatcaatttattctagctaaaggagttgatcagaagcaccaatttaaagcaccaatcactgtcgttctctcagaaccatctcttctctgaacaaaacaagtagaagagttaatagtgaatctgcattttccttgcctattttaaggttttgatgttgacactaatttgtgaaatccctcctgtggtgtgatatttcgttttccttgctttttgttaggacaagaatgcttcagctcttaatttaaaattatgtttctccctcccaggtggagtgaacttagcatgcattctctgacatatccaagtttttgttaatatgaatttggggggaaaagcatacttaattagctaagacttcttattctaggcttgaccctgtgttcgacatctttttaatttgtagttgcataggctgctctctgacactggttagtgatctggaagctatattaacgttaggagaggtggtgtatgagcactagaggtatccttgcaagggaagacttgtcttatgtcaatacgtcttttttttgcacacaagaaagtcaatgtttgagtcttctaaaatcttcctatttccaagttgcagagtacaattgattcctaaacaacgatctaatttttgactcagagacgtggcaaggtagtgaatcaccattataatttaacaatcttcaagataaaattatttctctgatatttagattttgcccaattattaagatatttgggtgtttcgttaagaatggaagactctagtctcttgagcagagactataaaggcctcagatgatcatttataattttatgctcttttctttaacaccttcaacacagttggaagcagccaatattccccagtgttgttgtgttttttaaaccaaatgcatggttcagtggtagaaaactgggctgatccaagctgttttcagtaaacacttcatttcaggtgacctatttcatattaaataatctctagatcctgtcttcaaaactaactagatcagataacctaccctagattttcccctttagggtctgttagctgcagtcacttttgtgaaaatgattgcgatgaaaagatagagttgtagatggggaaaatgttttgactaatttaagcatagtggtatttaatatgagaatttaagttacacacatttgaaaattataatggagtctcttggctgagctttaaaaaaaatagcgtttaggctaaaaagggaactgctacctctcctaaaatcagaaagatgttacagtaattctccattctctagaattatcaggaagcacctttgtgatgatttacttttgctcttgggagtgtgagcctgtgtagtcgtggaaccgtcaattagagtgatggctttctgatcccaaagtcattcgttctgaaaacaatatttttcataaatttgaatgtgagaagttttgatcttgccattcccaagtaactctcttaataagaggcatcagcatgcttcagtgacagctgtcaccttccagtgctgagagtcatctttgagttctccatttcactccctacactccaatttagctgcagttctcttggccagtcctatgaaatacatccatggcctaacgacttctcaccactaataccactcatacttacagcattctcacctaagtcactaccttttttctctggattacaatagcctcccaatttatttgctcacataacctatttattctacacagtgcaccagatacacccctttgaaatgcaaacggaatcatattattctctggtgaaattatctcatatattcctatcgcatttaaaattaattcagaataatcccatgattatcaaaaccctatgtgctcttccacaacatgatttacttccaagatatctcttcttcaacttttttttcactgtactgaattggtgactaaaagtcatatttttgtttttgcttaaaaagtcttgacttgtaaatttttcagtttctcctttatccacaggtaactctttcctcataaggcgaattgcttgcttccttgagttctgctctcaaagatacccttcatgttctacctaatattaataactttaatcattcattattccattactatgctctatagtgtatacaatttctgttctttgtcctgttattaactaaattatttatttgttccagtaacgtattccataaatattgtacacataaaaattatgttatttttattgctgtatgctcagctgcccaataacagtttgaggattaacatatttgttaaatgcacaaatacattctttcacaaatatttaataattttatattaaactccctatatacttacagtatgaattagataattcagaataaacattccattggaaaaaactaaacaatttgttataaaacatccttaaaagcatcagaaggttaatacagacatgaagaattacaggaccaaattaagaacggtatggaagcctgtttgtgaggcttatgtttgggttatctctttacttagagtgactataaatctcaaaagagaactaaagggagaaataaccatatctactaacatggtaagggtatttaaacatctcttagtaattgagaaaattgaaagaaaagaaaaaagaaagggagaaagagaaacagagcaaaagggataatgaaggagagaaagaagaagagaaaggaagaggaagaaaagtaaaaaggaggaggagggggagggaggaagaaagaaaggtgaaaggaaagaaaggtaaagtttttaacagcataatttatccttgtagaatatgaatgttggtctatttgatgatgtcccacagattccttagtctctgctcattttttatctgtttctcagaatcaatattttccattttcttatcttcaagctcatgactttttctgtgtgtgcaaatatactcttaaatccctctggtgatttttaaatttttatcattgtagttttccactccagaatttctgttatctctttgttgatattcctactttttaatatttttttctgattccttcatttctttgtttatgttttccttttgacatttgacatttgagtataattaagagagttgttttaaagtctttgtctagtaagtttgatgtctgggtttccttagagatattttctgtcaatttattttgtccctttgaatgacccatactttcccgttctttgtatgccttgtaactttttttgaaaactggacattataataattataattactatgtggttactctgtaaatcagacccccccctacaaacatactaacgttctgtggttttaaattttatttacttattatattgttaaggatttttttttagtgaaattttccaaagtgattaacaaaactgtttgctttataaggtgtggtcacccaagtctttttgtttccttaacaaatgttaagataatgttttgactgattttcttgtatgtcaggaactaagcaaacaggcaaatacaacaaaaacaaaaagaaaaacaagtaatcattatccagcaaaataggtctctaggccatgcagactggctttgtgctgggttctttaaagccgggacaaagtgtgtgttcactcttgcactgagtgaagttcaagttcactcttgcacagagcctgcactgaggggagggatcagcgaaggtaaaagtgtagggtcttcttatgacatttgtcagcatgtggcttaacgtatgcatacatgtgactttctagactctcccatgtacgtgaatgattttgaatgtcttagttttccatatactctactccaacttttcttcctgtgctgaaggtgatctactatatgtgtaaactctaatttttgccctaagcatctgtggcttgttaggtctccttgtagagtttcttaataatgtccattccttatctgttctgtatcctagcaacacacacaaaaaagcctttcattagtcctttaggtatcccccagaccagtcagaacagacacataataatttgagggtaagatcttctcttgttcctttggacgatggaccaggtttcctcactgggaacgtgggcttctgacacttcaaaacagccaatttgctggggcaaaggcaagttaaaaacgtcataaagttttcaagttgtcttgttcttgagtctgctttcacttggttgttgtaatcttttgaccattttccagagttttggcaaagtttattcggacagtttctcttagttgtgtgatgtttctgtggggaagtgaaagattgcagttgtctccactgccattttgctgatgctcctcttttgtcaatttttgcttcatgttcttatgctttgttattagttcatgtattagttttctagggctgccataaccaagtaacacaaactgggtgccttgaacaacacaaatttatagtcttatagtcctggaagctaaaagtctgagactgaggtgtcagcagggatggtcccttcaagggctatgagagaaagtctgttctgtgccttgtttctagcttctggtggtttagtggcagtctttggcatttcttggctaatctctgccctcataatcacatggtactctccctgtatgtatgtctccctctactcaattttcttctttttataaggacatcagtcatattgaattcaggctcatctgattttatcttaacttaatcacctgcaaagaacctatttcctaatgaggtcatattcagtggttaggatttcagcgtctatatagatgaaacaatttagctcatatttgtgcatacatgattgtaatagctatgtcttccaaaagtgctgacccccttattactacaatataaatttttaaaatcctattcacatttttaatagtctatatcgtgtgttatgagtataatgagttcagtgttcttatgattgctctttgcatgatattttttgtcatctttttactttcaatccattagtatccttgcgtctcagcgtatattgggatcacttgttttaatccagtctgagaatctctgcctcttgaatggattttaatctgctcacatttaatattataattggtataattctatttatgtctgccattttaccgtttgttttgtgtatttctcaaatatttttctttattgctttattttgcaatgaatgaatattttctaaaatatggaactttagattactaatgaattattttagtatatatttttgggaatttttgttgttgttgtaagtttaccatataggtatatggaaaattaattattcaaatcatcttccaatttatactagtaaacttttagtaatacatagaaacatcattcttatacaaatctcttatatttcctccattttaaagtattatcactttacacattatatctattaaagttacaaagccaacaatacattttagtaattactactttaccatctagagtgattaccttatcacaatacatttttcttccaactacctcctctttgatgttactggaaaatatgttatagatatattacatttctacatgtcaaatactcagcaatacattatgagcatattattattattattattatcattaagacggagtctccctctgtcacccaggctggagtgcagtggcacaatctctgctcactgcaagctccatctcctggcttcatgacattcttctgctttagcctccggagtagctgggactacaggcacctgccatcacgtccagctaattttttgtatttttagtagagacagggtttcactgtgtcagccaggatggtctctatctcctggcctcgtaatacgcccacgtcggcctcccaaagtgctgagattacaggtgtgagccatcctgcctggccattatacgcatattattttataaacaatttatgataaagagaaaacatggatttctactgtcttttataatgttaatattacctataccagtgcttttttaaaaatgtggattcaaacgactggcttgtgtaacttgcttttagccttaggaatttattttagtgttttttttttttttttttttttttttttttttttttgtatggtaggtctgccagcaacaccttcagttaatatttctgtttatctgggtaagactttgtgttatcttcatttttgaaaaataattgctggataaggaattggtggctgacagttttttttcctttgcatcttttgaatatattattctactgcctcttgccttccattgtttctgttaagtcagctgttaatcttacaaaacctaggtgttcaaaaaataaacatgtgcatgaatatttatagcagtaatattcataccgtcaaaaagtggaaacaatccatatgcttgtttactcataaatagacacccaattttcagctataacaaagaatgaagtacttatacatggtataatatgggcgaaatttgaaagcattatgttaagtgcacaagaggacaaatattacttgattttattcacatgaaacaccaggaattggcaaattaattgggatataaatcagattagtggtcattagggctcagggaagcagaatagggtgtaacaactttatgcataatgggtttttagaagggacatgacgaaattttcctggaacattgtgaatatactaaaagcaagtgcattgtgcattgtatgctttaaaatggttgttattaattttatattatgtgattttttaccttaaaaaacaaaaaagagaaaatagccttactctatatacaataaattcaagatgtgttacaaatttatatgtgaaatccaaaatagtataatatttaaggaatagctgagtagaataacactaaaatttaacataatgaaatatttccttaaaaaagaaaaaagcacagtaattaaaaagggaaatatagttaatattttttctctccattaagcatgccattaactgagtaaaatatcaagctgcaatatgtaaactgcattttctaaaaccataaagaaaataagaaatgaaaagggattggggaaaaaaatccaaaggtacagtcaactacacaaaaaaaccttagtctcattaatcagtatgaaaatgcaaattgtaactgaaataagataaaactacaattcaaagagaaagcctaaaatttcaaccccccaaaaattctgggttttggagagctgggatggaatagggctgctaaccttacaacaatgaaagaaccaaactaacttcaaagtcatgactttatttttatagtaaccaggttgcgaagaactgagtaaaaatgtgagggaaaacaagcaactgcaaggagaaagaggacagatgcacttacataggacagatgcaaatagacaccactatgacaagtaaagctggaataatcaataaattcctaaagacaaagtggggctggtcagattgggagaccgctgacagctgcagaagttgggaaagatccatcatcttgaaaactttttccccacaaacccactgtgatctctcaagcaattggtaaggaatccaagacagtctgtatatgatacagatcagggagagcagaacacttgggaggtgaccaggtcttgggggccgagcccttatgaatgggattagtgcctttataaaagaagctcaatggagttcttgtgtgccttccactatgtgaggacatagaaagaaggcaccatctatgaaccatgaaatgggctctcatcaacactgaatttgtgagcatcttgacctgagaacttacagcctcaagaagtgcgaaaaaagaaatatctgttgctttttagtcacctggtttatgttattttgttataagagtccaaatagaccaagatattccattccacttaatatgtaggggaagacaacaaaaactgccacacttagaatactcctgatgctgggagtatgaaaacaggaaaaacaaaacaaaactgctcttgaaggtgaaggaggaatatcactgagctcaccaacacagcaggaaaagaacagtgagaaggctacattcatgagaccctgagaaaaagtacctgcataagactgagatgaaattacctaccctagttataattgaaatcccaaaaagaaaagaggaaaaaataatggagcaaaagaaatatttttcaaaataactgccaaaaatattctaaaagaagtgacagaaaatcaaacttcagatataggaaactcagagaatgtcaaatagaacaaaaataagaattacatcttgaaaaatctttaaaaaatcaactctaaattttatatcttgctccaaatatatagagatataaataggttatcatcgagatatggagaaagccatgtcatggaaacaataaaataaagctgtggaagggctacattgatattagacacaacagagttcagaacaagaaatagtatcagagttgagaagtaataagtaatataataatcaattcttaagaagatgtgaacatcctactaattagggtatgcagctaacaacagaacctccaaatacatgaggtaaaacaggaaagaaatcaaaggtgaactagaaaaatccaaaattatatttgcagacttcaacacttttgtcttagtaatggacagactaggcaaaaactcagtaatcatatggaagataagaacaacaatatcaccaacaagacatccaatcttcaatggcagatactctttcctttcaagtgaaaaaaaaaaaaaaaacaacaacagtatggcatattctctaacaaacccagaatttctaatatttgcggtcttccttccttctttccatcttcctttctcttctcttcccttcccttgccttcttccttcctttcttcttttcctctttcttttctctctggttttctttcttttctttcttttttctccttccttccttctctccttctttctttcctcattctttcttccctccatcctcccttcctttctccctcccttcttttcttccttttctcttattctttctttctcactttcttgctttctttccttttttctcccttccttcatcccaccttttcttccttcatccctccctttctttcctcctttttccttccttacttccttctttacttccttccttctcctctttattttctttgtttcttgcctttttctcttttaacattctctcttcctcctttccttcctcccttcctccttcctttctttattctttctttcttgtttctttctttctttctttctttctttctttctttctttctttctttctttctttctttctttctctgtctctctttccttcttgtgttcttgctttcttttttctcccttcctgcctttctcccttcctccctccctcccttccttctctgatttcctccttcttttctttcttctttctttctttccttcctttgttctttcctttcttcttttttctttcttcttttcttttctttctttctctttactacaattcatattatttaaaaaatttaagagagggaggcagaaaaataaagaacactttaatctgcaggtaaatagattatgtctgctgtatacaaaagaatggcctcccaaaaatgttcatgtcctaattcccaaagtctaacatacaaatatgttaggttgcatggcagtgggaaattagatttcaagtgaaattaaggttgcaataaaatgatggagagattatcttaaatgggtgggatcaatgaaatcacaagcttccttataagtgaaagaagaaggcagaagaaaggcaaccatggaggtggtggcatgagaaattactcaacatcactgacttttaagatacaagaatgaggacccagcgcggtggctcacgcctaatcccagcactttgggaggccggcgtgcgtggatcacgaggtcaggagatcgagaccatgctggctaacatggtgaaaccccatccctactaaaagtccaaaaaattaactgggcatggtggcacgtgcctgtagtccaagctactcaggaagctgaggcaggagaatcgcttgaacccaggaggcagaggttgcagtgagctgagatcgtgccactgcactccagcctgggcgacagaaggtgactccatctcaaaaaaaaaaaaaagatataagaatgaggtcatgttccaaggaataaaggtggcttctgcatgctgaaaaaaatcaagtacatagattctgccacagagccctcagaaagactgcagccctgcccaaaacttgatgttagccctgtgagtctcatttaagccttctgagctccagtactgtaagattaccagtcactttactgtaagatatgaagtttgtggtaattgcttacaacagcaagaggaagtttatatagtaattgtatcacgaaaatgagaaccataatttacaactgcttttaatactgcacttggatgtttgaaatcacgtacatggaaatgatcagtatgtgtatgagggaagatagcaaattgatgccaaaataacgcaaatgcaaatcttacactcatttctatgtaggtttcatttaatctttgaaattaaaatgaaattaaaggattatgatattttgatgaaattagactaaaatgaacaataacaaaataagaacttacatatattccttatatggtcaataatgaagtgatagtggaaaaaaacaaggtcaaatgaaggtgatgatttaggaagttggaaagatagcttaaaatacaaaatggtgtataactagtgaacacttagacacactgattgatgaacttcagcttttggcttgatgagagcataaaatgagagcagctgaggtttgcaaatttgtaatctgcttgtggaaaaacaggggaaaacacatctcagcctaataagatttatctactaaagagtcaagaattgatccatttgtccttgtaattcaaaagctaattcaaatactgatttgatgtattgtgtgaacaatcattgctgattatcatcgcatacctggcattctcttttatctgatatctaaaatatttggtaattcctggactttctcttttcaaacccagtatggattaatttcaatcttagaacagttgtctttgagaaattcttccctctactgcatctgtgaatgggcatagcatggttacctacatactgtcgccccagagaacatttgttgaattaaagccaaagtttaaagcaacagctttaactcactggttttactaatgttttcctccccattagccacaacaatattgataccctcacaccctttaacataaagcttggtgttgtctatttttcacgtgctgtcatctatatgatctcagtattttaaaaatcagcttccagcccatatggtggctcatgcttgtaataccagcagttgaagaggctgaaatgagaggattctttgagcccaggagttcaagagcaacctgggcaacataacaagacccagtcttcatcaaaagttaaaaaaaaaaaaggtggccatggtgaggtgcacctgttgtcgtagctatttgggaggccaaggtggaaggattgcttgagcttgggaggttgaggctgcagtgagcagtgattgcaccactgcactgcagcctgggcaacaaagcaagaccctatctcaaaaaatatatataataaaaataaaaatcagctctcattgatttctacataaatgtgaacaggtgatgtccatatagacataaataataatatatctgacaatggtccatatgatcttcaaaatgtaaaatgcctatctgtgtaattgactggttagtctcattaatgaatatagattcaattctactttcttgttctagataaattatataatctagcttttcctttcactcatttactgataacaacaggaagaatgacaagatatctattttggaaaattactctggtaggagtaaagatgaaacaatgatagaattgcatggaaaactagaaaaaagtatggtcttctgatattatatcacatcatataataaagccctcatacaactcagatattttatctaaaaatgttattttcatcttaggaatgatcacagcatgagactagaattgtattacaatgactctcacaagcacatgtgctaaaaaggagaggaaaacatcattactgatattttaaacatatgttttactttccatcaacgtgaacctcaacttgatatgatgcagattgaaggaaatcacccataattccatatgaagaaggcctgtgatattttatgggaaaataaatagagaaaatgctaacagaaaccctattaagcattaagctttatggagcaaagacaaatccagtggtgaaagatacacactcgagttctgtttgttgtcttggaacaatacggtttagaggtgactggtgggtgaggagaacatatgcgagttcaccaaacagaaaagctgaatgaggcaatgcctctttctgaccatatctcttactcagataactatataatttattgtccagtaaagggtatatttaaaaatcatattaaaagtcatgcaatgaagttgtccagggaaatcaagacttaagagtctcactctgacaataatgaatggggggggttccctcaagaaagactaggacatgactccacactggcaggtagtagtaccagaaaagaacccatggaaaatctttaccttatgcttgaggtagggaccaggctaaagtgaaagccagacataaaattcaatctaaaatatatccaaaattgaagaaaatatgtgttgtacaggcatagaatgtctttcctggatcattgaaatagtaagataaattcaattttttacattgttttattttcctccagttagggcttgaggtttgtctctggagagagactgtcaattggagccctgcctttctggggttctgggcagggggttgtggatgcttaacatgtgcctttcacaggacacttccttaccccagcagtggccaggtgtgcatcccacgagcaggcctccctctcacagaaaatctgttgagactaggagatgcctggtggctgttgcgtgacctgtgtcctgtgtatttctgacaagagccactctcagagaccctggccaggaggagagttaggttccagtgtaggtcagctcagacacatggaggccacaggaccaaacatgggaaatcacagaagtagttttattactcacagatccagagagaagagggtagctgagaagagggtttagctgtgtccccagccaaatctcatcttgaattcccacatgttgtgggagggaacaggtgggaggaaattgaatcatggggacaggtctttcccatgctgttcttctgatagtgaataagtctcacaagatctgatggttttataaaggggagtttccctgcacaagctctcttgtcttgtctgctgccacgtgagacctgcctttcaccttccaccatgattgtgaggcctacccagccatgtggaactgtgcacctattaaacctctttcttctggaaatcacccagtcttgggcatgtatttaccggcagtgtgaaaatggactaatacagtagcacacctcatagggctgaacaaaatgaggaagataagtggggagcaagagagaaaaaagtggtctgtgggactccagcctttattgagcccagaacattacccaaataagttttccacggggctctggtcagtggggtgagagccagtaggcacatttcttggctgcagctgcaactgagcaggtcactctggcgtgtgggggctgtccatgtgggctgtgaggtctgtggggtgagtcaggtaggttgtatccaacagttccacaacggctagtcaccaggaggaggcagctgtgtagggtcaatatctgggccagccacactgaggaactgtgagggttagaactggaaatcatcaagggaatctgaacccagctaccatatgagagagttcaacttacgttcaatgtgaatgccatggcaatattaaaaggtaagaattcgctccatacgtgtttgaggtaaataggagaaacctagaatttatgtaaacagtgagaagattggatgcgttttccgtcacatattttaatactagcagcatattatatatgtcaatccatcaggcattcagaagtacttgcttatgaaaactttttgcaccatcagacaaaagacaagggtagaagacatttttaaccctacaaacactagtaaattaaaaacagaaggacctttatgtcctaatatgtctatgttgtgaaaggctgccctgtgaaatacaggatttcttaaacatattttaaaaatcatagctgtcaatattttttagaaatccatttaaattttctcttgcttttttacaattcctatttatttatttagtggttctgttgattttgatgtatagcctaaactttatatttctttaaagtatgttttatacaactttatgtaaaatgtttgagtatcttcacgttctcaccctgtccttttgttttgctcttatatggtggccttgagtcttttctctggcttttcaaacctagtaagactaagacaccaaagtaactttgcccgtggtttcgtaatgccttctaaagcacatcctaagctctcgtgcatacaggggtctcctttgagctctatgcttttgagatcccatatacctaaattccagtactccaaatcagtactgctcagttttagttactaagtttaaaaatgtattttaataacaagttagtttagttcactcttgcttctttctttactgctggtatacatgtatattcctttaaataaatcttggaatttatttaaaaattttaaattatactaatgaaactgtatattgttgtggattcataggtgaatttggaaagaatttgtctttgtgatactaaatcctttttatccaagaatcatatgtgcctttatatttattccagtctatatttatatcactgagtaaatatatagaaatgtagatacatacagctgtagctatagatagatacaaatatagatataacatgttaaatctatatctatcccatataacatatatgcatgttatatgtgtgtgtatatatatatatgtttgtgttattaaagagctcccttaaaatttttcttttatttcctatataattttaggttgagcttgaattttctttgtacaaacaagcaaatatttatactagttttaatactgaggtttagacattctatcttatattagcattgaatattttcacaattataaatattatctaatattaataatgtaacttaaaaatatttaaaattttacctttgaattattttattgttgaatttaaattcctttaagtatgacagtaaatttctattttatgctttctctatgcatatgaaattaatctattcacttctctacctttatgtagtaacatatgaaaatcaggcctctgttcttctaatggacatacacatgtttgcatatagaatatcagactctttatagtatttaaaatctttaaagacgtgaatatgaccttttaacaaatatattttagcgtgtactgagaatcccctatttattttttatttgggctaatcaatatgattattaatattattggattaccaaatttggaatcacactttcatccccaaggtggatatttgttttatttttttgccaatttcttgtcttactgtttcaaatactgttggatattatttttattttatttggcattttagtatcaatatttgtaagtgatgtactctacatattttttcttcaatatctggtgggttttataattactgctatattggatttgtagtagacattgagaaaaattattcctgcatgttttatagctgtatgaaggaaactaatatattttaccccaaaatatatttccttgatatatttcaaaatggctattgagaagggctggaaatgcaaacatagctgcaaagctgtcttggggagatttgcatcagtagagaatctgccttgatgcagccaggctttctctgagatctgttcccttgtctggatctaggaaagattaactgagggtctgaggtctgcaaaggtctgaaagaaacattttctgtctattatctctgaggactgctcccagtgaggtttcacctacgtaataagtccactgttgctagccagggtccttttctcacataacttttttttttttcctctgtgatccaagaccccattctttctgtaaacttcatgtggtagttaaacttctgcacccatcgtgtgtctgggtcttcattctaagggctccagtgtacacacattgcagaaacctgtatgccttttctactatttatctgcctcctgttagtgattttcagggaaacttcagaaggcaaaagggacattctcctttagcccatactcagacaaaatcccccaacatttaactgattcctaatagcttaaaatcactttgaaaactccacatatttataacttttcttccctctatgatttctgttcagcttgggttttgttttttattccatttacttcatcctcgaaagacctattttatgtctatttattctcatttattgacattgagaaaagaaaataactttcatgtgagaaacgcaagtccttttaaataatcaggcccagagagatattcagatgagacagcagttctgttctgctcctctttgagctgtgtgttcatctaggctgccgctgttgccacagtagctataaattaaccaataacgccacaccagacactataatccacacccaataatagtgtaacagtgtatagccagtcactaataaatgttatttccataagccaatgagaatttgtgacaaacctctttgcatcatcccacttcttgtcccttttttgcctttaagaaactgcttgttgcaaagctccaaagggagttcatatccaaggatacttgggtctgttccttccaggcagctgtcctcattgtggctcaagtaaactctttgaattacgttttgtgcttcagccccttccacttagattaacaacatggatttgtgtcaccatgtacagcaattaaaatgtttacacttttcccctcgagggcactgatgtgttttcctgagcacttggaatagctacttagtgtttactttctagaatatggtttctcaaccttggtgctacttacctttaggaccagaggattctttgttgtgggaggctgccctagcaatgctaggtgtttcgtttgacctctaaatttcacacctccaccagtcttgacatccccacaataaccctagacattgacaaatgtctcctggggaaaactccaccagttgacagccaaagttcttgaaatattggaatcgtcaattgagtttttatgttatccaaaacaaatatttttctttgtttttaaacatctacttccatctacttatctacttatttttacttttatttataacttaattccatcaaggagagagagtgcattttgtgttatgctaaatttttgaagaatgtattgattttttatggcctgatatatggatgatatgtagatattacatgtttgtattatcaaatttcagggtgataataaaataaatacttataatatttatattgtcactgtatattagttatttctttcttcactacaggagtttttcaacctataggctatttttcaattctaggttatccagtagattttgaaatgttatgattaaatatctacttctcaagcattcatctttgcaaaggaatcaatcccaagctcttataatgcacatcatataaagggcagattagtcaatatatggttcagaaataattatgtaatatttataagaaaattaaaaatttagatccttaactcagataacaataatccaaattaaaatttgatttaattacataatttaaaatgacaccagaatactagtaaaaatgtagataagtttatataatcctttttagctgtagaactttattagcataaattcaaatacaggaaccaaagtaagattgagacctatagtcaaaggttaaaatgtacacattataggggcatgattaaactaatttaaagcatagtaacatggagaaatattgcaaaacatacattttactgaattaattgttaatatctaatcattacatgagaacaaaggtaaagagtagctacacacacacacacacacacacacaagtgcaatattttcagtaaacgtgatgttcagctacactacaaatcacacctatgttttctccacagaaaagtaaagattaaaaatcacaataatatttattgtacatatggaggtaaagatactcaaaatattaccctaaaatacttttttttttgagatggagtcttgcttttattgcccaggctggagtgcaatggcacaatcttggctcactgcaacctcagcctcccagggtcaagttattctcctagctcagcctcccaagtagctgagattacaagcatgcaccaccacactcggctaattttttatatttagtagagacggggtttcaccatgttggtcaggctggtctcgaactcctgacttcaggtgatctacccacttcagcctcccaaagtgctgggattacaggcatgcgcccggccaactttttgacatatttcaagatggctactcggaagactggaaatagcttcttctacaagaatagctgaaaagctgtgtttgttggggagatttgcatttgtagagaaaatctgcattgatatagacaggctttccctgagatactcccttgtctgggtttaggaaagattaactgagtctggcacgtttacatttctaaaaaccatttcctatctttacttcccaagaggagggctgctccctgtgaggtttcatccatgtaacaagaccacctctgctgccaggctcctctttcttccttgtcgtcacctgccttctgcaaagcctgatttagcaaagtacagctctgtgttttctgtaacctcaagacagcataggcgtgttgactaccttgcctttcctggagtttttatacatatacagtatatatttgtatatcaatttataatatacaaatatttgtatatacatatttatgtatattatgtaaactccaagtgcatacttgtgcacgtaattatatctgtaaaccttttttcctgttaatttgtacattatcagtttgtttgatagactcaaataattaaagcttcaagggaaaaatttaaactttcctatagagaaaagacatatatgtgacaaataatatttagagtgtaagacgctttttaaaggtatatttgcaatttgtgtcaaaacatttaaatatacatttgttactttataaaatttcaaataatttaagctaaatacatagtatatgcagaaaatttagcaatatttgtatgtagcaccttactgtgcattactgtaaccagctgtctaatataaagaactaattaaggtagtacctacttttcaaatatcgcattttttcacagacctattaaataagacaaataacatttaaactttatttttaaatttgcagaatagtatttttcagcagatggtttattttagcaaattccatcttcacattgtgctatgcttttatgagttccagctgttaacggataatattttactgctgaatctatcatgtgtgatataattgctcattatgtgccttaaaacacaagcgatatggttattttcaacttggagcaaattaaaatcttatcagcaatttaaaaagtctagagtcgtcttcttctggttaatttttttaaacttgtatttttctctttatgtttttagtgagttgtcttatcaaggagaagaactcaagctgattattctttttttttctcttccatccacctcgctggtgtgtgaataatttcatttctcagaaaatgttctttcatatccatcttacaagatgagagaccttttaacatcttccattcggatgtgataccagtaatggaaaatattccagcttcatgaatatggtgatacaaatagttatccgtctaacctctgtcagtgccaaatgtttactttactcagtgaattactcagctgactggtaatttcttctgaaatcactaatgagaggatcagaggtctggctgttgtctgtacctcgtatgactcccagtgcagacaattgtttctatggagcacagacagttgaatggattgacttcctgcctagaatagtttctgctgtgcttcttatccttcttatggagatttcagattatctgaattgcttttctatcttaagaaaaaactcaacaattctcccacctgagaggaaagtaaactttagtaagttagcagaagcaatccgtaaagtttttacattgtttgttgtaaaatgcagcgttggtgtctccatcactaaccttttctatccctcattgctgtttctttgactgcaataggatacctctaggcaaatctgtattcccgagacagagtgccctttccgttagctataagtacactcaatggtaggctgaaatgatagtttttatctatggtgaaatggaatcatatcagtgatttttttaaaggaattttaactcttgctatggtttgaatgcttgccccttccaaatctcctgttaaaatttgatccccaatgttgcaggtggggcttactgggaggtgtttggtcatggggatggaacttcatgaatggataataccctcccttaggaatctcaagctatcctccctcctcggtgccctcaggaatgaatgtaccattctttattcaactataattcccccacccatcccttttgagatattaattaaatgtatgttacactgctgcatattgtctcacgtatcagtgagtttctggctttcttattttagtttaccctttgtcctttagtttgtaaagcttctaatttttctatatattttctgatgttagggtaaaatacatgacttattctatctcatggaatttttatttaaaatatttatttttcatctatacgtgtcacatttttcattttataacttccatttttctcctatgttcaattttcatttaagtactttgacatatatatgtatttatctatatgtatttataaaatatatttactttaaggaccttgaaaattccttcttctgtcatttataaatggcttatttttatcctgttaatatatatcttaataatatatatcttctggcttctttgcatgtcagagttttttttgggggggtattttgatgttatgctattgaatatctagattttattggctacctttgaacaatgttgtggcaggcagttcagtaacttcaggatgagtatttttctgttgttgttttaaatcttctctttaaactttgttgagttagtctagagccatctgtaatttggagctaaatgagcactgtcactagggcataacctccagtggtctttactgaatatcctggaggtacagaggggattcccttctctggctggtcagagctaacatgtcttcctgtcatgtgacgccagggaagtgttcttccaactccctggtagagtcctttgctgagctccttagaatttcatcctatgtacatttggcttagggacttgggagaaaccttaggctgattattggttcctttttctgtaaacgttctcttctactacacattccagctgcttaacattttggtttttatctggttcctcagtgcaatgacaatgtctgctctctctgggattcctctctactgctgtcacggagaacctgggaataaagcaggactcattctggctccttcttttctcttgcggagcacagtcctgtgctgcctgatgttcagtatttcaaaaaaagtttcatatattttgtccagtttactattctttaactctaaaagagtaactccagtcccagttacagcatcatgttctgtaactctactccttgttgcttcattctgccattgtctggtatgattgcccctttcccttctgtaatcaggccaagagcataacataatactagttataactgcacagcttgcctccgttgtgtaaaaaaatcactgagacttaactgtgtccaactttttaaatgtgaatataagtacaactaaagctatattttgtttaatatttgcattgcatgcttttccattatttagtttcaaaatatgtgaaatataaatataaattataaaaactttaagagagtacatttaaaaaatctggtctgattatgttttaactggtttattacaacatgcattcttgaattcagggtctaatataattggtacatttgtctatttgcaaaaaaaacttgacaatattttaaaattaatttatccaactcacaacttatatgcttctgctgttgtatggaagatgcattttaaactttatgagctagcattctgttatacagtcgatgtccaattaaatttctctctatgtttatttctttcattaaaaaaagcgttcttctaactgcaaactttcatcagggatcatagctcttctacctgaagaataatctttagtatttcttatcctgtgggtctgcttgggataaattctttattgtatctttgcttttgatggatatgtccaccaagtagacagttctaggtcggcacttattttatttcaggacttgaaaggtatcaatacctcacttgttggctttcattgttcatttgagaaggttgttatcagtcaactctttctctttatagttagcccaatttttttatcaagtgcttttgacatttttcttttacttttcagaaattgtcccatcatgtttctaggtgtgtcctctctgtgtgttttcatttggtttgcaaagcctcctgaacctgtggattaatattattggtcaattttgataaaacctctaacattgccacttaaaatgctgttcagaccagctgttttgtccttcttagatttcaacgtgttagattattactgtatgctttatattttttaaataacctttctctactttttttttagttggttaatctgtattagtgtatcttttgcttttttattttattttattttattattatactttaagttttaggatacatgtgcacaatgtgcaggattgcaacataagtattcatgtgccatattggtgtgctgcacccattaactcgtcatttagcattaggaatatctcctaatgctatccctcccccctccccccaccaccaacagtccccgaagtgtgatgttccccttccggtgtccgtgtgttctcattgttcaattcccacctatgaatgagaacatgctgtgtttgcttttttgtccttgcaatagtttactgagaatgatgatttccagtttcatccatgtccctacaaagcacatgaactcatccttttttatggctgcatagtattccatggtgtatatgtgccacattttcttaatccagtctatcgttgttggacatttgggttggctccaagtctttgctattgcgaataatgccacaataaacatacgtgtgcatgtgtctttatagcagcatgatttatagtcctttgggtatatacccagtaatgggatggctgggtcaaatggtatttctagttctagatccctaggaatcgccacactgacttccacaatggttgaactagtttacagtcccaccaacagtgtaaaagtgttcctatttctccacatcctctccagcacctgttgtttcctgactttttaatgattgccattctaactggtgtgagatggtatctcattgtggttttgatttgcatttctctgatggccagtgatgatgaacattttttcatattttttggctgcataaatgtcttctttcgagaagtgtctgttcgtgtccttcacccactttttgatgggattgtttgtttttttcttgtaaatttgagttcattgtagtttctgaatatcggccctttgtcagaagagaaggttgcgaaaattttctcccattttgtaggttgcctgttcactctggtggtagtttcttttgctgtgcagaagctcttttgtttaattagatcccatttgtcaattttggcttttgttgccattgcttttggtgttttagacctgaagtcctttcccatgcctatgtcctgaatggtattgcctaggttttcttctagggtttttatagttttaggtctaacatgtaagtctttaatccatcttgaattaatttttgtataaggtgtaaggaagggatccagtttcagctttctacataaggctagccagttttcctgacaccatttattaaatagggaatctttccccattgcttgtttttgtcaggtttgtaaaagatcagatagttgtagttatgtggcattatttctgagggctctgttctgttccattgatctatgtctctgtttggtaccagtaccatgttgttttggttactgtagtcttgtactatagtttgaagtcaggtagcgtgatgcctccagctttgttcttttggcttaggattgacttggcgatgcaggctcttttttggttccatatgaactttaaagtagctttttccaattctgtgaacaaagtcattggtagcttgatggggatggcactgaatctataaattaccttgggcagtatggccattttcatgatattgattcttccaacccatgagcatggaatgttcttctatttgtttgtatcctcttttatttcattgagcagtgttttgtagttctccatgaagaggtccttcacgtcccttgtaaggtggattcctaggtattttattctctttgaagcaattgtgaatgggagttctctcatgatttggcactctgtttgtctattattgttgttcaagaatgcttgtgatttttgtaaattgattttgtatcctgagacttttctgaatttgcttatcagcttaaggagattttgggctgagaaaatgggtttttctagatatacaatcatgtcatctgcaaacagggacaatttgacttcctcttttcataattgaatagcctttgtttccttctcctgcctgattgccctggccagaacttccaacagtatgtggaataggagtggtgagagagggcaaccctgtcttgtgccagttttcaaagtgaatgcttccagtttttgcccattcagttttctattgactgtgggtttgttttagatagctcttattattttgagatacgtcccatcaatacctaatttattgagagtttttagcatgaagaattgttgaattttgtcaaaggccttttctgcatctattgagataatcatctcgtttttgtctttggttaggttgatatgctagattacatttattgatttgcatatgttgaaccagccttgcatgacagggatgaagcccacttgatcatggtggataagctttttgatgtgctgctggatttggtttgccagtattttattgaggatttttgcatcaatgttcatcaaggatattggtctaaaattctctttttttggttgtgtctctgccaggctttggtatcaggatgatgctggcctcataaaatgagttagggaggattccctctttttctattgattggaatagtttcagaaggaatggtaccagttcctccttgtacctctggtagaattcggctgtgaatccatctggtcctggactctttttggttggtaagctattgattattgccacaatttcagagcctgttattggtctattccaagattcaacttcttcctggtttagtcttgggagagtgtacgtcttgaggaatttatccatttcttctagattttctagtttatttgtgtagaggtgtttgtaatattctctgatggctgattgtatttctgtgggattggtggtgataacccctttatcattttttattgcatgtatttgattcttctctcttatcttctttattagtcttgctagtggtctatcaattttgttgatcttttcaaaaaatcagctcctggattcattaattttttgaagggttttttgtgtctctatttccttcagttctgctctgattttagttatttcttgccttctgctagcttttgaatgtgtttgctcttgcttttctagttcttttaattgtgatgttagggtgtcaattttagatctttcctgctttctcttgtggtcatttagtgctataaatttccctctacacactgctttgagtgtgtcccagagattcaggtatgttgtgtcttttttttcattggtttcaaagaacatctttatttctgccttcatttcattatgtacccagtagttattccagaacaggttgttcagtttccatgtagttgagcagtcttgagtgagtttcttaatcctgagttctagtttgattgcactgtggtctgagagacagtttgttatgatttcttttcttttacatttgctgaggagagctttacttccaagtatgtggtcaattttggaataggtgtggtgtggtgctgagaagaatgtatattctgttgatttggggtggagagttctgtagatgtctattagatctgcttggtgcagagctgagttcaattcctgtgtacccttgttaactttctgtttcattgatctgtctaatgttgacagtgggttgtgaaaatctctcattattattgtgtgggagtctaagtctctttgtaggtcactcaggacttgctttatgaatctgggtgctcctgtattgggtgcatatatatttaggatagttagctcttctcattgaattgatccctttaccattatgtagtggccttctttgtctgttttgatctttgttggtttaaggtgtgttttatcagagactaggattgcaacccctgcctttttttgttttccatttgcttggtagatcttcctccatccttttattttgagcatatgtgtgtctctacacgtgagatgggttcctgaacacagcacattgatgggtcttgactctttatccaatttgccagtctgtgtcttttaattggagcatttagtccatttacatttaaagttaatattgttatgtgtgaatttgatcctgtcattatgatgctagctggttattttgctcgttagttgatgcagtttcttccttgtctcaatgatctttacattttggcatgattttgcagtggctggtactggttgttcctttccatgtttagcgcttccttcaggagctcttttaggtcaggcctggtggtgacaaaatctctcagcatttgcttgtctgtaaagtattttatttctccttcacttatgaagcttagtttggctggatatgaaattctgggttgaaaattcttttctttaagaatgttgaatatcggccccctctctcttctggcttctagagtttctgccaagagatccgctgttagtctgatgggcttccctttgtgggtaacccgacctttctctctggctgcccttaacattttttccttcctttcacctatggtgaatctgacaattatgtgtcttggagttgctcttctcgaggagtatctttgtggcattctctgtatttcctgaatctgaatgttggcctgccttgctagattggggaagttctcctggataatatcctgcagagtgttttccaacttggttccattctccccgtcagtttcaggtacacctatcagacgtacatttggtcttttcacgtagtcccatatttcttggaggtttgttcgtttctttttattcttttttatctaaacttcccttcttgcttcatttcattcatttcttcttccatcacttataccctttcttccagttgatcacatcggctcctgaagcttctgcattctttacgtagatctcaagccttggctttcagctccatcagctcctttaagcacttctctgcattggttattctagatatacattcgtctaaatttttttcaaagtttttaacttctttgcccttggtttgaatttcctcctgtagctcagagtagtttgatcgtctgaagccttcttctctcaactcatcaaagtcattctccacccagcttttttccattgctggtgaggaactgcgttcctttggaggaggagaggtgctctgctttttagaatttccaatttttctgctgtgttttttccccatctttgtggttgtatctacttttggtctttgatgatggtgatgtacagatgggtttttggtgtttatgtcctttctgtttgtaagttttccttctaacagacaggaccctcagctgcaggtcttttggagttttctagaggtccactccagaccctgtttacctgggtattagcagcggtggctgcagaacagcagattttcatgaaccgcgaatgctgctgtctgatcgttcctctggaagttttgtctcagaggagaacccggccatgtgaggtgtcagtctgcccgtactggggggtgcctcccagttaggctgcttgggggtcaggggtcagggacccacttgagaaggcagtctgcctgttctcagatctccagctgtgtgctgggagaaccactgctctcttcaaagctgtcagacagggacatttaaatctgcagaggttactgctgtctttttgtttgtctctgccctgcccccagaggtggagcctaaagaggcaggcaggcctccttgagctgtggtgggctccacccagttcgagttcctggctgctttgtttacctacgcaagcctgggaaatggcgagcgaccctccccaagccttgctgccgccttgcagtttgatctcagactgctgtgatagcaatcagcgagactccgtgggcgtgtcaccctctgagccaggtgcaggatataatctcctggtgcgccgtttgttaagaccatcggaaaagcacagtattagggtgggagttacccgattttccaggtgccgtctgtcacccctttctttgactaggaaagggaactccctgaccccttgcacttgccgagtgaggcagtgcctcaccctgcttcggctcatgaactgtgcactgcacccactgtcctgcatctgctctctggcactccctagtgagatgaacctggtacctgagatggaaatgcagaaatcacccatcttctgcattgctgacactgggagctgtagaccggagctgttcctattcggccatcttggctacacttggtagtttcttttccctctgcttctgggttctgagagtttgtcactaacataggattccagaacactgctgcagggttctgagtgattgttgctcacatgggattcaaaaacactcctgctgggttcagagtgttatccctcacatacgattccagaacactgctatgaggttctgaatgtttgtccttcacaaaggattccagaacactgctgctgggttctgagtgtttgtccctcatataggattccagaacactgctgctgggttctgagtgtttgtccctcacataagattccagaactctgctatgaagttctgaatgtttgtggctcacataggattccagaacactgctgctgggttctgagtgtttgtccctcacataggattccggaacaatgctgctgggttctgagtgcttgtcccttatattggattccagaacaatgttatgagggtctgaatgtttttccctcatgtaggattcaagaacactgctaagagggtctcaatgtttttccctcacaaaggattgcagaactctgctgctgggttctgagtgtttgtccctgatataggattccagaacactgctatgagggtctgaatgtttttccctcacaaaggattccagaacgctgctgggttctgtttgtttgtcccccacaaaggattccagagcactgctgctggtttcttagtgtttgttccacacatgattccagaacacttctgcgatggtttgaatatttctccctcagataggattccagtacacagtggctgggttctgagtgttggtccctcacataggattccagaacactgcttctgggttctgagtgtttgtcactcacataggattccagaacactgcttcgagggtctgagtgtttgtccctcacaaaggatgctggaacactgctgctggtttctgagtgtttgtcactcacagaggattccagaacactgctgcttccagaacactgctgctgggttctgagtgtttgtccctcacataggattccagaaaactgctatgagtgtctgaaggtttgtccataacaaaggattccagaacaatgctgctggatctgaatgtttgtccctcacacaggattccaggacactgcttcgagggtctgagtgtttgtccctcacacaggattccagaccactgcttctgggttctgagtgtttgttccacatataggattccagaacacagctacaaggctatgaaagtttgtctctcacaaaggatttcagaaaaatgctgctgggttctgagtgtttgttcctcacataggtttccagaaaactgctgctgggatctgagggattgtccctgtcattgagtacgagaacactgctgctgggttctgaaggtttgtccttcacttagaattgcagaatactgctgctaggttatgagggtttgtccctcatgtagaattctagaactctgctgctgggttctgagcatttctctatcacatgagattctggaacactgctaaaatgtaggaatgtttgtccctcacaaagagtccagagcaccgcttgtgggttctgagtgtttgtccctcacataggattgcagaacacagctgctaggttctgagtgtttctcccaaacataggattccaaaacaccgctcagagggtctgaaagtttcttcctcaccaaggattccagaacactgctgctgggttctgaaagtttgtccctcacatacgattccagaacactgctatgaggctctgaatgtttgtccctcaaagggattccagaacactgcttttgagttctgagtgtttgtccgacacaaaggattccagaacactgctgctggcttctgagtgtttgtccctcacataggatttcagaacactgctatgagggtctgcatgtttttccctcagaaagcattctgtatcactgctacgagtgtctgaatgcttgtccctcacataggattccagaacactgctactgggttctgactgttggtccttcacataggattccagaacactgctccgagggtctgaatgtttgtccctcacataggattccagaacatttgctgctggtttgtgagtgtttgtccctcatatgggattccagaacacttctgctgggttctgtttgtccctcatataggataccagaacactgctattggcttcagagtgtttgtccctcacataggattccagaaaacttctaagaggttccgaatgttttccttcagataggattccagaacactgctgctgggttctgagagtttgtccctcacataggattccagaacactgctaagagggtctgaatgtttgttcctcagataggattccaggacactgctgctgggttgtgtgtgtttatcactcacatagaattccagaacactgctacaagtgtctcaatgtttgtccctcacatagaattccagaatattcctgctgtggtctgaatgtttgtccctcacatatgattccaggacgctgctgctgtgttctgcgtgtttgtcccccacataggattcaagaacactcctgctgtcttctgaacgtgtgtccttcacagaggattccagaacactgctactagcctctgaattgttgtcccccacagaggattccagaacactggtactagggtctgaatgtgagtctctcacataggattccagaacactaatgccggggtctgaatgtttgtccctcacctaggattgcagaacactgctacgaggttctgaatctttgtccatcacgtagcattatagaacactgctacgaagttctgaatgtttttccctcagagaggatcaaagaacactgctgctagtgtctgaaattttgatgatcacgtaggattccagaactctcctgctgtggtctgtatgtttgtctctcacataggattccagaacactgctacgagggtctgaatgtttgtccctcacaaaggattctagaacactgctgctgggttctgagtgattgtccctcacataggattccagaacactgctgctgggttctgagtgtttgtccctcacataggattccagaacactgctacaagggtctgaatgtttatccctcacaaagggttccagaacactgttactggattctgagtgtttgtccctcatattggattccagaacaatgctacgagggtctgaatatttttccctcacataggattcgaaaacactcttacgagggtgtgaatgtttttccctcccaaaggaatccagaacactgctgctgggctctgaatgtttgtccctcatataggattccagaacactgctacgaggatctgaatgttttcccttacaaaggattgtagaacactgctactgggttctgtttatttgcccctcacaaaggattccagagcactgctgcatatttcttagtgtttgcccctcacataggattccagaacacttctccaaggttctgaatgtttgccctcagataggattccagtacactggctggattctgagtgtttgtccctcacataggattccagatcactgctacaggttctgaatgtttgtccctcacaaaggattctagaacactgctactggtttctgagtgtttgtccctcacaaaggattctagaacatggcttctgggttctgtgtgtttgtccctcacataggatgccaaaacactgatgctgggttctgagtgtttgtccctcacatagcattccagaacactgctgctggcttctgagtgtttgtccctcacatacaattccagaacactgctacgaagttctgaaggtttgtcgctgacataggattccagaacactgctgctgggttctgagtgtttgtccctcacataggattccagaacactgctacaagggtctgaatgtttatccctcccaaaggattccagaacactgctgctgggttctgagtgtttgcccctcaaataagattccagaacactgctatgagggtctgaatgtttttccctcacataggattcaaaagactgttacgagggtctgaatgtttttccctaacaaaggattgtagaacactgtcactgggttctgtttgtaggtccctcccataggattccagaacactaatacgagggtctgaatgtttgtccctcacataggattccagaacagagctgctgtgtcctgattgcttgtctctcacaaaggattccagaacactgatgctgggttctgagtgttcgtctatcacataggattccagaacaaagctgctgggtcctgattgtttgcccctcacaaaagattacaaaacactgctacgagggtctgaatgtttgtccctcatataggattccagatcactgttgctgggttctgagtgtttgtccctcacataggattccagaacactgctgctgggttcttcgtgtttgtacctcatataggattccagagcactgctacaagactctgaatgcttgtcccttacataggattccagaacactgttttgagagtctcaatatttgtccctcacaaaagattgcagacaactgctgctgagttctgagagtttgtccttcacttaggaatccactgattctgggttctgaatatttgtccttcacataggattccagaacagtgctgctggcttctgagtgattgtcccgcacgtaggattccagaacactgttacgagggtctgaatgttcttccctcacaaaggcttccagaacactgctgctggtttctgtttgtttgtccctcacaaaggattccagagcactgctgctggttatttagtgtttgttgcccacataggattccagatcacttctgcgaaggtctgaatgtttagccctgagataggattccagtacacactggctcggttctgagtgtttgtaccacacactggattccagaacactgctgctgggttctgagtgtttgcccctcacataggattccagaaaactgctatgaggaccttaatgtttgtccatcacaaaagattctagaacaatgctgctggatctgagtgtccctcacataggataacagaacactgcttcgagagtctaaatgtttgtccctcacaaaggattctagaacattgctgctggtttctgagtgtttgtcactcacataggattccagaacactactgctgagttctgaggctttgtatctcacatagtatttcagaacactgctatgaggttctgaatgtttgaccctcacagagcattgcagaacagggctatggggatctgaatgcttgtccctcacatatgaatccagaacactgctgcagggttcagagtgtttatcccacacataggattacagagcactgttctgagcatctgagtgtttgaccctcacaaaggattgcagaacactgctgctgggctctgagtgtttgtcccttacataggattctagaacactgctgctgggttctgagtgtttgtctctcacataggattccagaacacttctctgaggatctgaatgtttgtccctcacaaaacattccagaacactgctgctgggttctgagtgtttgtccatcaaataggattccagaacacggctgatgggctctgtttgtttgtccctcacaaaggattccagagcactgctgctggtttctgaatgtttgtccctcacataggattccagaacacttctacgaggctccgaatgtttgtccttcagataggattccagaacacagtggatgtgtgatgagtgtttgtccctcaaataggattccacaacactgctttgagggtctgaatgtttgtatctcacaaaccagtctaaaacactacttctgggttctgagtgtttgtccctcacatagaattctagaacactgcagctcgtttctgagtgtttctccgtcactttggattccagaacactgctaagattgtctgaatgttcgtcccttaccaaatattccagaacagtgctgctgggttctgagtgtttggccctcacattggtttccagaacactgctgtgattgtctgaatgtttgtccctcacaaattattccagagtactgctgctgggttctgagggtttgtctctcacatagaattaaagaatactgctgctgagttctgagattttgtacctcacatatgattccagaacactgctatgagggtctgaatatttgttcctcacagagcattccagaatggtgctatgagggtctgaatgcttgtccctcacataggcagggttctgagtgtttgtccctcacacaggactccagaacactgctctgagagtctgagtgtttgaccctcacaaaggattccagaacactgctgctgggttctgagtgtttgtcccacacataggattccagaacactgctgctgctttcttagtgtttgtctctcacataggattccagaacactgctgcgaggatctgaatgttgtccctcacaaaggattagagaacactgctgctgagttctgagtgtttgtccctctcattggattccagaacactgctgctaggttctgagggtttgtccctcacataggattccagaacactgctgctggtttcttgggtttgtctctcacataggattgcagaacactgctacgattatctgaatgttgtccctcacaaagtattacagagcactgctgctgggttctctctgtttgcccctcacattggattacagaacactgctgctaggtttgagggtttgtccctcacataggattccaaaacactgttgctgggttctgagtgtttgtccctaacatacgattccagaacactgctatgattgtctgaatgtttgtccctcacaaagtattccagagcactcctcctgggttaagagtgtttgcccttcacataggattccagaacagtgctgctgggttctaagtgtttgtccctcacataggattccagaacactgctacgaggatctgaatgtttgtccctcacaaattattccagagtactgctgctgggttctgagtgtttgtccctcacataggattccagaacactgatacgaaggtctgaatgtttgtccctcagataggattacagaacacagctacgaggttctgaatgattgtccctcacataggattccagaacacagtggctgggttctgagtgtttgtccctcatataggatttcagaacactgctatgaatttctgaatgtttgtcgctcacagaggattctagaactctgcggctgggttgtgttttccccccacataggattccagaatactgctgctgggttctgagtgtttgtccctcacataggattccagaactctcctgctgggttctgtttgtttacccctcacaaaggaatccacagcactgttgctggtttctgagtgtttgtccctcactcaggataccagaacactgctacgatggtctgaatgtttgtccgtcacaaaggattcataacactgctatgggttctgactgtttgtccctcacaatggattccagaaaactgctttgagagtctcaatgtttgtccctcacaaagtattccagagcactgctgcggggttctgtgtgtttgtccctcacatgggattcaaaaacactcctgctgggttcagagtgttttccctcacataaaattccagaacactactacaaggttctgaatgtttgtccctcacataggattccagaacactgctgctgggtttcgagtgtttctccctcacataggattccagaacactgctgctcggttctgagtgtttgtccctcacatagcattccagaacacaggtacgaagttctgaatgtttgtagctcaagtaggattccagaacaatgctgctgggttctgaatgtttgacactcacacaggattccagaacactgctgctgggttctgagtgtttgtccctcacataggattccagaacactgcttcgagggtctgaatgtttttccctcacaaaggactccagaacactgttgctgggttctgagtgtttgcccctcatataggattccagaacaatgctacgagtatctgaatgtttttccctcacataggattccagaacattgctacgagggtctgaatgtttttccctcacagagtattccagaacactgctgctgggttctgaatgtttgtccctcacataggattccagaacactgcagctgggttctgagtgtttgtccctcactttggattccagaaaacgtctacgacggtctgaatttttgtccatcacaaaggattttagaacactgctgctggatctgagtgtttgtccctcacacaggattccagaacactgcttcgatggtctgaatgtttgtccctcacaaaggattctagaacactgctgctggtttcttagtgtttgtcactcacataggattccagaacactgctgctgggttctgagtgtttgtcctcacatacgattccagaacactgctatgaggttctgaatgtttgtccctcacaaaggattccagaacactgcttctgagttctgagtgtttgtctgtcaaataggattccagaacactgctgctgggctctgtttgtttgtccatcacaaaggattccagaacactgctataggtttctgagtgtttgtccctcacataggattccagaacaattctacgaggctccgaatgtttgtccttcagataggatttcagaacacagtggctgggttctgagtgtttgtccctcacatagggtatcagaacactgctgctgggatctgagcgtttgtctttcacagaggattccagaacactgctgctttgttctgagtgtttgtccctcacataggattccagaacactgccgctcggtactgagggtttgtcccttacatagaattctagaacactgcagctcatttctgagtgtttgtccctcacttaggattccagaacaatgctacgattgtctgaatgtttgttccttaccaagtattccagaacactgctgctgggttctgagtgtttggcactcacattggtttccagaacactgctacgagggtctgaaaatctcgcacataggattccagaacactgctaagatggtctgaatgtttttccctcagaaaggattctggaaccctgctactggattctgtttgtttgtctcttacaaaggatttcagagcactgctcctggttgctgagtgtttgtccctcacaaaggatttcagagcactgctcctggttgctgagtgtttgtccctcacataggattccagaacacttctacgagtgtctgaatgtttgtccctcagataggattccagaagacagtggatgggttctgggtgtttgtccatcacataggattccagaacactgctgctgggttctgagtgtttgtccctcacataaggttccagaacactgcttctgagtgtttgtccctcacataggatcccagaacactgttgctgggttctgagtatttgtccctctcatgggattccggaaacctgctgctgagttcagagtgtttttccctcacataggattccagaacactgctgctgggttctgagtgtttgtccctcacattggattccagaacactgctgctgggttttgagtgtttgtccctcacatagaattc

SEQ ID NO: 168 - DNA, 1824 bp, Homo sapiens
acccacagaatcaaaaaactcagtgaatcataaacaggataaataaaaagaaaaccacacctaggcacatcatagtcaagttgttaaaaaaaacaaagagaccaagaagcagcttctctgctccttctggaatctctgcctggttcagcccacctgcctccactcctgcctccaccatgtccatcagggtgacccagaagtcgtacaaggtgtccacctctggcacacgggccttcagcagccgcttctacacgagtgggcccggtgcccgcatcagcttctccagcttctcccgagtgggcagcagcagcttctggggtggcctgggcggaggctatggtggggccagcggcatcggaggcatcaccgccgtcatggtcaaccagagtctgctgagccgccttaacctggaggtggaccccaacatccaggccgtgcgcacccaggagaaggagcatatcaagaccctaggcaaatttgtctccttcatcgacaaggtaccgttcctggagcagcagaacaagatgctggagaccaagtggagcctcctgcagcagcaggagatggctcagagcaacatggacaacatgttcgagagctacatcaacaaccttaggcggcagctggagactctgggccaggagaagctgaagctggagacggagcttggcaacattcaggggctggtggaggacttcaaggacgagaatgaggatgagatcaatatgcgtaaagagatggcaaatgaatttgtcctcctcaagaaggatgtggatgaagctgacatgaacaaggtagagctggagtctcgcctggacgggctgactgacgagatcaacttcctcaggcagctgtatgaagaggagatccgggagctgcattcccagatctcggatacgtctgtggtgctgtccgtggacaacagccctccctggacatggaaagcatcatcgctgaggtcaaggcgtagtacgaggtgatcgccaaccgcagcctggctgaggctgagagcatggaccaggtcaagtatgaggagctgcaggtgctggctgggaagcagggggatgacctgcggcatacagactgagatctccgagatgaaccggaacatcagctggctccaggctgagactgagggcctcaaaggccggatggcttccctgtggaggccgccatcgcagatgccgagcagcttggggagctggccgttaaggatgctaacgtcaagctgtccgagctggaggccaccctgcagcgggccaagcaggacatggcgaggcggctgcgtgagtaccaggagctgatgaacgtcaagctagccctggacatcgagatcgccacctacgggaagctgctggagggcgaagagagccagctagagtctgggatgcagaacatgagtattcatatgaagaccaccagcggttttgcaggtggtctgagctcggcctatgggggcctcacaagccccggcctcagctacggcctgggctccagctctggctctggcgcgggcttcagctccttcagccgcaccagctccaccagggccccggttgtgaagaagatcgagacccgcgatgggaagctggtgtccgcgtcctctgacgtcccgcccaagtgaacagctgcggcagcccctcccaccctgcccctcctgcgacttgcccagagcccgggagggaggccgctgtgcaggggagcacagggaacagaagacacacctgaggctcggctctagccctcagcccaccctcggcggaattcactgcctgaggaccacccttgcccatgcctccaactacaaaacaattcaattgcttt

SEQ ID NO: 169 - DNA, 110 bp, Homo sapiens
gtgataatgtagcgagattttctgttgtgcttgatctaaccatgtggttgcgaggtatgagtaaaacatggttccgtcaagcaccatggaacgtcacgcagctttctaca

SEQ ID NO: 170 - DNA, 6506 bp, Homo sapiens
aagcttggctcccttgaggttaggaattcgataccagcctggcaagcatggtgaaccccgtctctgctaaaaatacaaaaattagccaggcatggtggcacacgcctgtaatcccagctactcgggaggctgaggcaggagaatcacttgaacccgggaggcagtggttgtagtgagccgagattgtgccactgcactctggcctgggctacagagtgagactctgcctcaaacaaaaaacaatcaaacaaaaaccaaatagcaaacagatatatgaaaaagtgctcaatatcaataatcatcacaaaaatgcacatcaggctgggtgtggtggctcacacctataatcccagcactttgggaggccaaagcgggtggatcacttgaggtcaggagttcaagaccagcctgcccaatatagtgaaacatcttctctgctaaaaatacaaaaattagctgggcatggtggtgggtgcctgtaatcccacccgctcaggaggctgaggcaggaggatcacttgaacccgggaggcagaggttgcaatgagccgagatggcaccactgcacgggctgtaacctgggcaacagaatgaggctgtgtctgaaaacagaaataaataaggccaggcgcagtggttcacatctgtaatcccagtgtgattacagatcacactgtgggaggccaaggcaggcagatcacctgagctcaggagtttgagaccagcctggtcaacatggtgaacccccgtctctattaaaaatatacaaattagctgggcatggtggcagatgcctataatccaagctacttgggaggctgaggcatgagaattgcttgaacccaagaagtggaggttgcagtgaaccgtgatcacaccactgcactccagccttggcgacagagagagattctgtctcaaaaaaataaaaattaaaaaaaaaaaagaaagaaagaaaaaaaaaagaaaaatgcaaatcaaaaccacaatgcaatattgcctcacacctgttagaatggctattttcaagaagacaaaagttaaggattggtgagggtgtggagaaaagggaacatttatacagtgttggtggaaatataaattagttcaaccatcatggaggcttctgaaaacactaaaaatacaactaccttatgatccaataatcccacttgtgggtgttgttcaaagaaattgaaatcagtgtgttgaagagacatttgtcctcctatgtttattatagcattattcacaatagtcaagatatgaaatcaaggtaagtccccatcaacagatgaatgtataaagaaaatgtggtatacatacacaatggaacactagtcagccttaaaaagaaggaaaatctgtcatttgcaacaacatatatgaacctggaggacattatgctaagccaggcacagaaagatgaatactatattatctcacttgtatgtgtaattttcaaaacttgaacttgtagggagtagactggtggttaataatctgaagggagggtaaaaatgtgttgatcaaaggataaaaattttagttagagagaaggaataagtttttgagatatattgcagagcatgatgacaatagtgataaggtattgtacatttcaaaaactgctaagtaaattttaagtattctcatcacaaaataagtatgtgagctgagatatatagtaattagcttgatttaattattctacaatgcatgcatatatcaaaataccacattttactccatgaatatatacaattatttgtgaactaaaaatacattttgaaaaagaactactagaaaaactaaaaatgagaaaataaataagcacattaattaattaattaaaatccttgtctagtaagtttaatgttggtactttctcagggaccattttttgttaattacctttttttctatatattagctataatttcctgttttttgtatgccttgtaatttttaataaaaatgaacagttttaatattataatgtgataccttgggaaataaaattcctccctctccctagtgtttgctggtgatttttttttttttttttgagatggagtcttgctctgtcaccaggcttggcgcggtctcagctcactgcaacctccgccttccgggttcaagcgattctcctgcctcagcctcccgagtagctgggattacaggcgtgtgccaccatgtgcagcttatttttgtatttatagtagagatggggtttcaccatattgaccaggatggtcttgatttcctgacctcatgatctgtctgcctcgcctccaagtgctggattacagcatgagccaccgcacccgccactggtgatgttttaatagattgtaatttttttgaggtagcgtttgctttctcacccagtctggagttcagtgggccaatcacaagcccactgtatccttgaactactgggctcaatcaatcctcctgcttcatcctcctgagaagctagaactacgggtatgcaccaccacgcctggctaatttttatattttttatttttgtagagacagaggtctctctattttgcccaggctgatctcgaactcctggcctcaaaagatcctcctgccttggcctcctaaagtgctgagattaaaggtgtgagccaacgtacccagcccatttacagtatttttaatgttgacgtgagctatgtatacaattgttaagcatatactcactgagctttaatatgtataaccccgtgttctcttttgataaactagaaaacctttcccaacatcctaatacacttttgaaggatatcataaatagtgtgtttgagggctagaggaatggcccaagtactgtgatgaggttcataggatttggggctatttggaagacccttacaaggcatatagcacaacttttctatctgttgattgtctctgtagcatcctcacaaaatccactattggcttgcaggtcttcagagactggcattcaccagttctggaggtgttaactgttccatctttggacagctcagagtattcagacgtctttatttattagaactacacacaacaggactattcatcaacttcccccattgcagacagccctttgagttgtaaagagcccttccccaggtcttttattttcttttccataatatgtcctggtccctttaactgcttttcactggtgatgatttggagggcccccaccagcctgctaattagatcctgaaggctttatcaaagtcctctttaaatggcatagccctgaagccaaggacagactcctgtttagtggggggaggggctcttcaaattagagggggttgagcacttttctttgaccctttcttctgatactgaccttgtatgaatcagactttcccccctttatatcagattctggtcctgccctgtatacaactttggctcctttcctgcagacaggctcagtgcttctttggtgattttatgctgccatctggtggctaagtcgacagtgccggctttttttgggcctaatttagcagaggagaggatgtacagatgaacatagtgacaatcctagaactggaataatctgaatctttaaaaagaggacctgatttcttcctattgtgtgccatgtgattgggagcccaaagaagaggatgctaacacagctatggcatggccacagaaaatatgcctgaaatatccccatcagagcccaactcttactagctaattgactttgagcaagtcacttttccttctagtgtctcagtttccatacttctgatcctaacaggtttataaaatggagccaagcagtagtgaaggtgaggccaggtcgggaagaggaggaagtaaagtgaattgaaagctagtgagggcaggggagtaagtaaaacctgaaggtgataaatggcagaagagggcaggactgctctagggcaaaggcctaggcaaatatttttcagaagttccttttaatgtaaacagtttgattaaaaatatattacaaatacatgggcccatgtgaggtgtagtgatttatcaatgaaaatttagaataccaggtggagaagagatgcttacgtatttgtttattcaacagttcacatatcaatttttataatgaccttgcaccatatcttcctttttaggtccagaaatcatctctttgtgtttattgtcaaatgcaccattcctggctaatttcacatctccctctatgagaaaaacatagcaacactgtactacttccatttttgcaatggcactctggaacctctttgtattgaaattataaatttcttgcttttgcagtttctttagcctaagggtcaacagtggatttaggtaggccacagctctgaacatgtcctgtgtccaatgtgagtgtcaccccataacggcacatcagcaccattttgcatgcctagccttaagagttaccatttaaaaaactccaatgacaaccaatgagagtgatctgctagcgtggctgcccacctggaaccagggcctggtcacagaaacccaggacaaccagtttataaattgtctttttggctttttatttgaaaaggtatttttgtgaaacaaaaggttttaatttcagagtcaaatttatcaatctttcatatttgatgctacttgagtctttagaaaatttttccccaactaaatttcttttttctttttttgagatggagtcttggtctgtcgcccgggctggagcgcagtggcaccatctcggttcactgcaacctccgcctcctggattcaagtgattctcctgcctcagcctcccaagtagctgggattataggtgcctgccaccatgcccggctaatttttgtatttatagtagagacggggtttcgctatgttggccaggctggtctcaaactcctcacctcaggtgatccagccacctcggcctcccaaagtgctgggattacaagcatgagccaccgcgcccggccaaccaaatttcttaaaagtatagaacatttccacacttgtagaaacttctagtagataaagttgtattagaggtttggtaatccagtctttctgatagctgcttcataggtgtcactgtaggtagtttctctctttgttaagcattgttttcctcaaaggtaccattgtattgcaccactttacaatacaataaccctcatttggaatgacaagtcagattactttttttgtttgatccaaggacacttagaagatggaaggtatttcttaaggaagaaaatttgcatactttattatttttctggaaactgaagagcaagcttacctgatagatttgggtcgatagttacactttccagttcagccagtgggagggtaatgtatcctttgactttctagaagttgctctataatacttaagttgccattgtctcccttctggttctctgttgtttctcgaatgacatagaagagtttatgagattaattgcttcctactgaaatagccaggtttctgagggcagctttggcttttatatgagctttttcttcctaccacttatcagttactgacagagggtcaacttcactactgtgtcatatggttggtccaatgttgggttcctcagattcatggaggaaataggaaaatagtaaagattaaggagtcatagttaaaaaattacaaacaggtcacaaaccagtactctttcttgattatttaggaaccaaatagccattctatgaaatgtcttcctttcctttttctctcttgctcaccaattgactcgtaagcacttccgttctcttatggttgggagccatacaaggtagagtgttggagtaaaaactacattgactctgaatcatggtgtgtgacctcgggcacatgatgtaacctctataggactctattttaatgtataaaacaggaataatcctttattattatctatgcaatacatattccattatctattacatgggataatggaatgggaagtcccttgaagatggtactaacctcaatgtattactcctttctagcttctttgggtcaaaagtttggtggaggagttacaaattctggtttgaatgatatatttggatactttatcaacacatcaaagctctacctatcccttcccccattctcaaaaccaagctgaattaacatctttacatttattatgcagtttatggaggattttagcattaattattgcttgatttactcaatgtccccatgttatagatgagaactggaaaacccattgaagttgtgactcctggtctagaaatgaagtctacttccagttaatgttctttctggtatgtctttgctttcttgaaatttcccttttttgtccttactgggtaaattttgaaccaaccaaatcacaaagatgtccggctttcaatcttctaggccacgcctcttatgctctctccgccctcagcccccccttcagttcttaaagcgctgcaattcgctgctgcagccatatttcttactctctcggggctggaagctt

SEQ ID NO: 171 - DNA, 1742 bp, Homo sapiens
gcagaaggaggaaggacagcacagcctacagccgtgctcaggaagtttctggaacctaggctcatctccacagaggagaacacacaagcagcagagaccatggggcccctctcagcccctccctgcacacagcacatcaaatggaagggggtcctgctcacagcatcacttttaaacttctggaacccacctaccattgcccaagtcacgactgaagcccagccacccaaagtttccgaggggaaggatgttcttctacttgtccacaatttgccccagaatcttactggttacatgtggtagaaagggcaaataagggacctctaccattacattacatcatatgtagtagacggtcaaagaattacatatgggcctgcatacagtggacgagaaacagtatattccaatgcatccctgctgatccagaatgtcacccgggaggacggagtatcctacaccttacacatcatacagcgaggtgatgggactagaggagtaactggaaatttcaccttcaccttatacccgaagctgcccaagccctacatcaccatcaacaactcaaaacccagggagaataaggatgtcttacccttcacctgtgaccctaaaagtgagaactacacctacacgtggtggctaaatggtcagagcctcccagtcagtcccagggtaaagtgacccattgaaaacaggatcctcattctacccagtgtcacgagaaatgaaacaggaccctatcaatgtgaaatacgggaccgatatggtggcatccgcagtaacccagtcaccctgaatgtcctctatggtccagacctccccagaatttacccttcattcacctattaccgttcaggacaaaacctttacttgtcctgcttcgcggaatgtaacccaccggcatagtactcttggacaattaatgggaagtttcagcaatcagaacaaaagctctttatcccccaaattactacaaagcatagagggctctatgcttgctctgttcgtaactcagccactggcaaggaaagctccaaatccatgacagtcgaagtctctggtgcctgccatggagacctggcagggtctcattcgtgactgccataacagagacactgagaaaaagatgcaaccatggaaaggtgcaaaggtggcaagttctaatgacatagaaaatagcaatcagcctttctcacatctgaaagccttccaaaatatctgagtgcagtagagaattgacagaggactgatcaccaacctagaagtatgctcctccaggaataggacgtcttcctttctttactccaatagagcagcggtgatgtcatttctgtatttcaggaagactggcaggagatttatggaaaagactctgacaaggactctggaatacaagctcctgataacttcaagatcataccactggactaagaactttcaaaattttaatgaacaggctgataccttcatgaaattcaagacaaagaagaaaaaaaactcaattttattggaataaataatcaaaaggataatgttttcataattttctatttgaaaatgtgctgagtctttgaatgttttattctccagatttatgaacttttttccttgaacaattggtaaagtatacttttgtaaacaaaaattgaaacatttgcttttgctgagtgccccagaattgggaaactattcatgagtattcatatgtttatggtaataaagttatttgcacaacttca

SEQ ID NO: 172 - DNA, 93 bp, Homo sapiens
atctacaatggtgatgggtgaatttgtagaaggatgaaagtcaaagaatccttctgggaactaatttttggccttcaacaagaattgtgatat

SEQ ID NO: 173 - DNA, 381 bp, Homo sapiens
agctgtcttcttcgtcttatttgttttgtctgtgcattacctgtggaagaaatggaagaaacaccaaaaaaagctgaaaaagcaagcctccttagaaaaacctggtaatgatctagaaagcccattgatcaacaacattgaccaaacactccacagagtggcaaccacagcatcagtgatatacaagatctgggagcacaggtctcaccatccttcctctaagaaaattaagcactgcaaattaaagaagaagagtaaagaagaaggagccagaagatactaaataaatgcatatgcaaatgtagcttagtcaattatagatatcacaaaagaaatctatcatctaaggattaaaaattgttctttggaaacctttataaa

SEQ ID NO: 174 - protein, 499 aa, Homo sapiens
MSLADELLADLEEAAEEEEGGSYGEEEEEPAIEDVQEETQLDLSGDSVKTIAKLWDSKMFAEIMMKIEEYISKQAKASEVMGPVEAAPEYRVIVDANNLTVEIENELNIIHKFIRDKYSKRFPELESLVPNALDYIRTVKELGNSLDKCKNNENLQQILTNATIMVVSVTASTTQGQQLSEEELERLEEACDMALELNASKHRIYEYVESRMSFIAPNLSIIIGASTAAKIMGVAGGLTNLSKMPACNIMLLGAQRKTLSGFSSTSVLPHTGYIYHSDIVQSLPPDLRRKAARLVAAKCTLAARVDSFHESTEGKVGYELKDEIERKFDKWQEPPPVKQVKPLPAPLDGQRKKRGGRRYRKMKERLGLTEIRKQANRMSFGEIEEDAYQEDLGFSLGHLGKSGSGRVRQTQVNEATKARISKTLQRTLQKQSVVYGGKSTIRDRSSGTASSVAFTPLQGLEIVNPQAAEKKVAEANQKYFSSMAEFLKVKGEKSGLMST

SEQ ID NO: 175 - DNA, 2201 bp, Homo sapiens
tagtttcctgtttccggcttcgcttcggcccacccccacgtccaccccgaatccctgcttaaaggccttgctttcttgtctaacgccgcaaccagtcctctgagttgccaacgtctttcttcttgtctcgacgccccgtcgtccggccacagcgattctctgcttagcaggatcggtccacagcgggacgtgagtccctttcctcctcgcggcttaccgcctctctccgcctagtgccaggtgctaataaagttgttgtttcaaatgcggccaggaacatcgcgagcggggaccaatcagagagtagctttgcctctataacggcgcgagagtgagacgtcatcggtgagcgactaacgctagaaacagtggtgcgcggagaggagaggcctcgggatgtctctggcagatgagctcttagctgatctcgaagaggcagcagaagaggaggaaggaggaagctatggggaggaagaagaggagccagcgatcgaggatgtgcaggaggagacacagctggatctttccggggattcagtcaagaccatcgccaagctatgggatagtaagatgtttgctgagattatgatgaagattgaggagtatatcagcaagcaagccaaagcttcagaagtgatgggaccagtggaggccgcgcctgaataccgcgtcatcgtggatgccaacaacctgaccgtggagatcgaaaacgagctgaacatcatccataagttcatccgggataagtactcaaagagattccctgaactggagtccttggtccccaatgcactggattacatccgcacggtcaaggagctgggcaacagcctggacaagtgcaagaacaatgagaacctgcagcagatcctcaccaatgccaccatcatggtcgtcagcgtcaccgcctccaccacccaggggcagcagctgtcggaggaggagctggagcggctggaggaggcctgcgacatggcgctggagctgaacgcctccaagcaccgcatctacgagtatgtggagtcccggatgtccttcatcgcacccaacctgtccatcattatcggggcatccacggccgccaagatcatgggtgtggccggcggcctgaccaacctctccaagatgcccgcctgcaacatcatgctgctcggggcccagcgcaagacgctgtcgggcttctcgtctacctcagtgctgccccacaccggctacatctaccacagtgacatcgtgcagtccctgccaccggatctgcggcggaaagcggcccggctggtggccgccaagtgcacactggcagcccgtgtggacagtttccacgagagcacagaagggaaggtgggctacgaactgaaggatgagatcgagcgcaaattcgacaagtggcaggagccgccgcctgtgaagcaggtgaagccgctgcctgcgcccctggatggacagcggaagaagcgaggcggccgcaggtaccgcaagatgaaggagcggctggggctgacggagatccggaagcaggccaaccgtatgagcttcggagagatcgaggaggacgcctaccaggaggacctgggattcagcctgggccacctgggcaagtcgggcagtgggcgtgtgcggcagacacaggtaaacgaggccaccaaggccaggatctccaagacgctgcagcggaccctgcagaagcagagcgtcgtatatggcgggaagtccaccatccgcgaccgctcctcgggcacggcctccagcgtggccttcaccccactccagggcctggagattgtgaacccacaggcggcagagaagaaggtggctgaggccaaccagaagtatttctccagcatggctgagttcctcaaggtcaagggcgagaagagtggccttatgtccacctgaatgactgcgtgtgtccaaggtggcttcccactgaagggacacagaggtccagtccttctgaagggctaggatcgggttctggcagggagaacctgccctgccactggccccattgctgggactgcccagggaggaggccttggaagagtccggcctggcctcccccaggaccgagatcaccgcccagtatgggctagagcaggtcttcatcatgccttgtcttttttaactgagaaaggagattttttgaaaagagtacaattaaaaggacattgtcaagatctgtcaaaaaaaaaaaaaaaaaa

SEQ ID NO: 176 - protein, 364 aa, Homo sapiens
MQKWFSAFDDAIIQRQWRANPSRGGGGVSFTKEVDTNVATGAPPRRQRVPGRACPWREPIRGRRGARPGGGDAGGTPGETVRHCSAPEDPIFRFSSLHSYPFPGTIKSRDMSWKRHHLIPETFGVKRRRKRGPVESDPLRGEPGSARAAVSELMQLFPRGLFEDALPPIVLRSQVYSLVPDRTVADRQLKELQEQGEIRIVQLGFDLDAHGIIFTEDYRTRVLKACDGRPYAGAVQKFLASVLPACGDLSFQQDQMTQTFGFRDSEITHLVNAGVLTVRDAGSWWLAVPGAGRFIKYFVKGRQAVLSMVRKAKYRELLLSELLGRRAPVVVRLGLTYHVHDLIGAQLVDCISTTSGTLLRLPET

SEQ ID NO: 177 - DNA, 7100 bp, Homo sapiens
gacatactgagaataaatccaaagacattagtttctttgcacgaaatgaggttacatatccagtgacatttatttgagctatttaaacaacttaaacatctttttcttttcttaataagggacgtttcaagttgtggtctcagccaaaatgagtgataccccttctactggtttttccatcattcatcctacgtcttctgaaggtcaagttccaccccctcgccatttgagcctcactcatcctgttgtggccaagcgaatcagtttctacaagagcggagacccccaattcggcggggtcagggtggtggtcaaccctcgctcctttaagtcctttgatgctctgctggataacttgtccaggaaggtgcccctcccttttggagtgaggaacatcagcacccctcggggcaggcacagcatcacgcgcctggaggagctggaggacggcgagtcctacctatgttcccacggcaggaaggtgcagcctgtagacctggacaaagcccgtcggcgcccgcggccctggctcagcagccgggccattagcgcgcactcaccgccccaccccgtagccgtcgctgctcccggcatgccccgccccccacggagcctagtggtcttcaggaatggcgacccgaagacgaggcgtgcggttcttctgagcaggagggtcacccagagcttcgaggcatttctacagcacctgacagaggtcatgcagcgccctgtggtcaagctgtacgctacggacggaaggagggttcccagcctccaggcagtgatcctgagctctggagctgtggtggcggcaggaagggagccatttaaaccaggaaattatgacatccaaaaatacttgcttcctgctagattaccagggatctctcagcgtgtgtaccccaagggaaatgcaaagtcagaaagcagaaagataagcacacatatgtcttcaagctcaaggtcccagatttattctgtttcttctgagaaaacacataataatgattgctacttagactattcttttgttcctgaaaagtacttggccttagaaaagaatgattctcagaatttaccaatatatccttctgaagatgatattgagaaatcaattatttttaatcaagacggcactatgacagttgagatgaaagttcgattcagaataaaagaggaagaaaccataaaatggacaactactgtcagtaaaactggtccttctaataatgatgaaaagagtgagatgagttttccaggaagaacagaaagtcgatcatctggtttaaagcttgcagcatgttcattctctgcagatgtgtcacctatggagcgaagcagtaatcaagagggcagtttggcagaggagataaacattcaaatgacagatcaagtggctgaaacttgcagttctgctagttgggagaatgctactgtggacacagatatcatccagggaactcaagaccaagcaaagcatcgtttttataggccccctacacctggactaagaagagtgagacaaaagaaatctgtgattggcagtgtgaccttagtatctgaaactgaggttcaagagaaaatgattggacagttttcatatagtgaagaaagggaaagtggggaaaacaagtctgagtatcacatgtttacacattcttgcagtaaaatgtcatcagtatctaacaaaccagtacttgttcagatcaataacaatgatcaaatggaggagtcatcattagaaagaaaaaaggaaaacagtctgcttaagtcaagtgcaataagtgctggtgttatagaaattacaagtcagaagatgttagagatgtcacataataatggtttgccatcaactatatcaaataactcaattgtggaggaagatgtagttgattgtgtggtattggacaacaaaactggtatcaagaacttcaaaacttatggtaacaccaatgataggttcagtcctatttcagcagatgcaacccatttttcaagtaataactctggaactgacaaaaatatttctgaggctccagcttcagaagcatcctctactgtcactgcaagaattgacagactaattaatgaatttgctcagtgtggtttaacaaaacttccaaaaaatgaaaagaagattttgtcatctgttgccagcaaaaagaagaaaaaatctcgacagcaagcaataaattccaggtatcaagatggacagcttgcaaccaaaggaattcttaataagaatgagagaataaacacaaaaggtagaattacaaaggaaatgatagtgcaagattcagatagtccccttaaaggagggatactttgtgaggaagacctccagaaaagtgatactgtaattgaatcaaatactttttgttccaaaagtaatctcaattccacgatttccaagaatttccatagaaataaattaaatactactcaaaattccaaggttcaaggacttttaaccaaaagaaaatctagatcactaaataaaataagcttaggagcacctaaaaaaagagaaatcggtcaaagagataaagtgtttcctcacaatgaatctaaatattgcaaaagtacttttgaaaacaaaagtttatttcatgtatttaacatccttgagcaaaaacccaaagatttttatgcaccgcaatctcaagcagaagtggcatctgggtatttgagaggaatggcaaagaagagtttagtttcaaaagttactgattcacacataactttaaaaagccagaaaaaacgtaaaggggataaagtgaaagcaagtgctattttaagtaaacaacatgctacaaccagggcaaattctttagcttctttgaaaaaacctgattttcctgaggctattgctcatcattcaattcaaaattatatacagagttggttgcagaacataaatccatatccaactttaaagcctataaaatcagctccagtatgtagaaatgaaacgagtgtggtaaattgtagcaataatagtttttcagggaatgatccccatacaaattctggaaaaataagtaattttgttatggaaagtaataagcacataactaaaattgccggtttgacaggagataatctatgtaaagagggagataagtcttttattgccaatgacactggtgaagaagatctccatgagacacaggttggatctctgaatgatgcttatttggttcccctgcatgaacactgtactttgtcacagtcagctattaatgatcataatactaaaagtcatatagctgctgaaaaatcaggaccagagaaaaaacttgtttaccaggaaataaacctagctagaaaaaggcaaagtgtagaggctgccattcaagtagatcctatagaagaggaaactccaaaagacctcttaccagtcctgatgcttcaccaattgcaagcttcagttcctggtattcacaagactcagaatggagttgttcaaatgccaggttcacttgcaggtgttccctttcattctgcaatatgtaattcatccactaatctccttctagcttggctcttggtgctaaacctaaagggaagtatgaatagcttctgtcaagttgatgctcacaaggctaccaacaaatcttcagaaacacttgcattgttggagattctaaagcacatagctatcacagaggaagctgatgacttgaaagctgctgttgccaatttagtggagtcaactacaagccactttggactcagtgagaaagaacaagacatggttccaatagatctttctgcaaattgttccacggtcaacattcagagtgttcctaagtgcagtgaaaatgaaagaacacaaggaatctcctctttggatggaggttgctctgccagtgaggcatgtgcccctgaagtctgtgttttggaagtgacttgctctccatgtgagatgtgcactgtaaataaggcttattctccaaaagagacatgtaaccccagtgacactttttttcctagtgatggttatggtgtggatcagacttctatgaataaggcttgtttcctaggagaggtctgttcacttactgatactgtgttttctgataaggcttgtgctcaaaaggagaaccatacctatgagggagcttgcccaattgatgagacctacgttcctgtcaatgtctgcaataccattgactttttaaactccaaagaaaacacatatactgataacttggattcaactgaagagttagaaagaggtgatgacattcagaaagatctaaatattttgacagaccctgaatataaaaatggatttaatacattggtgtcacatcaaaatgtcagtaatttaagctcctgtggcctttgcctaagtgaaaaagaagcagaacttgataagaaacatagttctctagatgattttgaaaattgttcactaaggaagtttcaggatgaaaatgcatatacttcctttgatatggaagaaccacggacttctgaagaaccaggctcaataaccaacagcatgacatcaagtgaaagaaacatttcagaattggaatcttttgaagaattagaaaaccatgacactgatatctttaatacagtggtaaatggaggagagcaagccactgaagaattaatccaagaagaggtagaggctagtaaaactttagaattgatagacatctctagtaagaatattatggaagaaaaaagaatgaacggtataatttatgaaataatcagtaagaggctggcaacaccaccatctttagatttttgctatgattctaagcaaaatagtgaaaaggagaccaatgaaggagaaactaagatggtaaaaatgatggtgaaaactatggaaactggaagttattcagagtcctctcctgatttaaaaaaatgcatcaaaagtccagtgacttctgattggtcagactatcggcctgacagtgacagtgagcagccatataaaacatccagtgatgatcccaatgacagtggcgaacttacccaagagaaagaatataacataggatttgttaaaagggcaatagaaaaactgtacggtaaagcagatattatcaaaccatctttttttcctgggtctacccgcaaatctcaggtttgtccttataattctgtggaatttcagtgttccaggaaagcaagtctttatgattctgaagggcagtcatttggctcttctgaacaggtatctagtagttcatctatgttgcaggaattccaggaggaaagacaagataagtgtgatgttagtgctgtgagggacaattattgtaggggtgacattgtagaacctggtacaaaacaaaatgatgatagcagaatcctcacagacatagaggaaggagtactgattgacaaaggcaaatggcttctgaaagaaaatcatttgctaaggatgtcatctgaaaatcctggcatgtgtggcaatgcagacaccacatcagtggacaccctacttgataataacagcagtgaggtaccatattcacattttggtaatttggccccaggcccaacgatggatgaactctcctcttcagaactcgaggaactgactcaaccccttgaactaaaatgcaattactttaacatgcctcatggtagtgactcagaaccttttcatgaggacttgctggatgttcgcaatgaaacctgtgccaaggaaagaatagcaaatcatcatacagaggagaagggtagtcatcagtcagaaagagtatgcacatctgtcactcattcctttatttctgctggtaacaaagtctaccctgtctctgatgatgctattaaaaaccaaccattgcctggcagtaatatgattcatggtacacttcaggaagctgactctttggataaactgtatgctctttgtggtcaacattgcccaatactaactgttattatccaacccatgaatgaggaagaccgaggatttgcatatcgcaaagaatctgatattgaaaatttcttgggtttttatttatggatgaaaatacacccatatttacttcagacagacaaaaatgtgttcagggaagagaacaataaagcaagtatgagacaaaatcttattgataatgccattggtgatatatttgatcagttttatttcagtaacacatttgacttgatgggtaaaagaagaaaacaaaaaagaattaacttcttggggttagaggaagaaggtaatttaaagaaatttcaaccagatttgaaggaaaggttttgtatgaatttcttgcacacatcattgttagttgtgggtaatgtggattcaaatacacaagacctcagcggtcagacaaatgaaatctttaaagcagtcgatgagaataacaacttattaaataacagattccagggctcaagaacaaatctcaaccaagtagtaagagaaaatatcaactgtcattacttctttgaaatgcttggtcaagcttgcctcttagatatttgccaagttgagacctccttaaatattagcaacagaaatattttagaactttgtatgtttgagggtgaaaatcttttcatttgggaagaggaagacatattaaatttaactgatcttgaaagcagtagagaacaagaagatttataatttcaatatcagcacactcattctttgtcaattcattttttcccatgagatgaagcacatgtgacgaatacggactagataacctctaagaattttccacttcttcaaaatgaacttactctagaaagcttacccttggataaccagtttgactttcataatgtctctgttttttgtttttccaacaattacagactcaggttctcttattttggaagtttctatctggttttgttctgaacttacattttttttttttttggtatctatgattttttttgctcagggcatcaaaatgtgctaaggacaagaattatatcctttttaaaaaatgttgttagcttggtgtaaaatgtatattgactgtattggtgaataaattgaatagacataacctcaaagtacttcacttattctttttaactactgatttgataaaaagtatgattataagatatccacgacaatctcatagtttctt

SEQ ID NO: 178 - protein, 220 aa, Homo sapiens
MLRLLLALNLFPSIQVTGNKILVKQSPMLVAYDNAVNLSCKYSYNLFSREFRASLHKGLDSAVEVCVVYGNYSQQLQVYSKTGFNCDGKLGNESVTFYLQNLYVNQTDIYFCKIEVMYPPPYLDNEKSNGTIIHVKGKHLCPSPLFPGPSKPFWVLVVVGGVLACYSLLVTVAFIIFWVRSKRSRLLHSDYMNMTPRRPGPTRKHYQPYAPPRDFAAYRS

SEQ ID NO: 179 - DNA, 286 bp, Homo sapiens
atgctcaggctgctcttggctctcaacttattcccttcaattcaagtaacaggaaacaagattttggtgaagcagtcgcccatgcttgtagcgtacgacaatgcggtcaaccttagctacaatgagaagagcaatggaaccattatccatgtgaaaggtgaggagtaagaggagcaggctcctgcacagtgactacatgaacatgactccccgccgccccgggcccacccgcaagcattaccagccctatgccccaccacgcgacttcgcagcctatcgctcctga

SEQ ID NO: 180 - protein, 168 aa, Homo sapiens
MKSGLWYFFLFCLRIKVLTGEINGSANYEMFIFHNGGVQILCKYPDIVQQFKMQLLKGGQILCDLTKTKGSGNTVSIKSLKFCHSQLSNNSVSFFLYNLDHSHANYYFCNLSIFDPPPFKVTLTGGYLHIYESQLCCQLKFWLPIGCAAFVVVCILGCILICWLTKKM

SEQ ID NO: 181 - DNA, 2652 bp, Homo sapiens
cgagagcctgaattcactgtcagctttgaacactgaacgcgaggactgttaactgtttctggcaaacatgaagtcaggcctctggtatttctttctcttctgcttgcgcattaaagttttaacaggagaaatcaatggttctgccaattatgagatgtttatatttcacaacggaggtgtacaaattttatgcaaatatcctgacattgtccagcaatttaaaatgcagttgctgaaaggggggcaaatactctgcgatctcactaagacaaaaggaagtggaaacacagtgtccattaagagtctgaaattctgccattctcagttatccaacaacagtgtctctttttttctatacaacttggaccattctcatgccaactattacttctgcaacctatcaatttttgatcctcctccttttaaagtaactcttacaggaggatatttgcatatttatgaatcacaactttgttgccagctgaagttctggttacccataggatgtgcagcctttgttgtagtctgcattttgggatgcatacttatttgttggcttacaaaaaagaagtattcatccagtgtgcacgaccctaacggtgaatacatgttcatgagagcagtgaacacagccaaaaaatctagactcacagatgtgaccctataatatggaactctggcacccaggcatgaagcacgttggccagttttcctcaacttgaagtgcaagattctcttatttccgggaccacggagagtctgacttaactacatacatcttctgctggtgttttgttcaatctggaagaatgactgtatcagtcaatggggattttaacagactgccttggtactgccgagtcctctcaaaacaaacaccctcttgcaaccagctttggagaaagcccagctcctgtgtgctcactgggagtggaatccctgtctccacatctgctcctagcagtgcatcagccagtaaaacaaacacatttacaagaaaaatgttttaaagatgccaggggtactgaatctgcaaagcaaatgagcagccaaggaccagcatctgtccgcatttcactatcatactacctcttctttctgtagggatgagaattcctcttttaatcagtcaagggagatgcttcaaagctggagctattttatttctgagatgttgatgtgaactgtacattagtacatactcagtactctccttcaattgctgaaccccagttgaccattttaccaagactttagatgctttcttgtgccctcaattttctttttaaaaatacttctacatgactgcttgacagcccaacagccactctcaatagagagctatgtcttacattctttcctctgctgctcaatagttttatatatctatgcatacatatatacacacatatgtatataaaattcataatgaatatatttgcctatattctccctacaagaatatttttgctccagaaagacatgttcttttctcaaattcagttaaaatggtttactttgttcaagttagtggtaggaaacattgcccggaattgaaagcaaatttattttattatcctattttctaccattatctatgttttcatggtgctattaattacaagtttagttctttttgtagatcatattaaaattgcaaacaaaatcatctttaatgggccagcattctcatggggtagagcagaatattcatttagcctgaaagctgcagttactataggttgctgtcagactatacccatggtgcctctgggcttgacaggtcaaaatggtccccatcagcctggagcagccctccagacctgggtggaattccagggttgagagactcccctgagccagaggccactaggtattcttgctcccagaggctgaagtcaccctgggaatcacagtggtctacctgcattcataattccaggatctgtgaagagcacatatgtgtcagggcacaattccctctcataaaaaccacacagcctggaaattggccctggcccttcaagatagccttctttagaatatgatttggctagaaagattcttaaatatgtggaatatgattattcttagctggaatattttctctacttcctgtctgcatgcccaaggcttctgaagcagccaatgtcgatgcaacaacatttgtaactttaggtaaactgggattatgttgtagtttaacattttgtaactgtgtgcttatagtttacaagtgagacccgatatgtcattatgcatacttatattatcttaagcatgtgtaatgctggatgtgtacagtacagtactgaacttgtaatttgaatctagtatggtgttctgttttcagctgacttggacaacctgactggctttgcacaggtgttccctgagttgtttgcaggtttctgtgtgtggggtggggtatggggaggagaaccttcatggtggcccacctggcctggttgtccaagctgtgcctcgacacatcctcatccccagcatgggacacctcaagatgaataataattcacaaaatttctgtgaaatcaaatccagttttaagaggagccacttatcaaagagattttaacagtagtaagaaggcaaagaataaacatttgatattcagcaactgaaaaaaaaaaa

SEQ ID NO: 182 - protein, 705 aa, Homo sapiens
MQLGEQLLVSSVNLPGAHFYPLESARGGSGGSAGHLPSAAPSPQKLDLDKASKKFSGSLSCEAVSGEPAAASAGAPAAMLSDTDAGDAFASAAAVAKPGPPDGRKGSPCGEEELPSAAAAAAAAAAAAAATARYSMDSLSSERYYLQSPGPQGSELAAPCSLFPYQAAAGAPHGPVYPAPNGARYPYGSMLPPGGFPAAVCPPGRAQFGPGAGAGSGAGGSSGGGGGPGTYQYSQGAPLYGPYPGAAAAGSCGGLGGLGVPGSGFRAHVYLCNRPLWLKFHRHQTEMIITKQGRRMFPFLSFNINGLNPTAHYNVFVEVVLADPNHWRFQGGKWVTCGKADNNMQGNKMYVHPESPNTGSHWMRQEISFGKLKLTNNKGANNNNTQMIVLQSLHKYQPRLHIVEVTEDGVEDLNEPSKTQTFTFSETQFIAVTAYQNTDITQLKIDHNPFAKGFRDNYDSMYTASENDRLTPSPTDSPRSHQIVPGGRYGVQSFFPEPFVNTLPQARYYNGERTVPQTNGLLSPQQSEEVANPPQRWLVTPVQQPGTNKLDISSYESEYTSSTLLPYGIKSLPLQTSHALGYYPDPTFPAMAGWGGRGSYQRKMAAGLPWTSRTSPTVFSEDQLSKEKVKEEIGSSWIETPPSIKSLDSNDSGVYTSACKRRRLSPSNSSNENSPSIKCEDINAEEYSKDTSKGMGGYYAFYTTP

SEQ ID NO: 183 - DNA, 3674 bp, Homo sapiens
aagtttccaagtggtcaacttgaccgatgctttggcaattgaaaaagggcagaaaggcgcgggctagtgggtggatggggacaaagatctaagtcaccttcttccagcgtgtgagcctgggaggagggtgggggtcctgaggagcaagaggtacgaggaaggaaaaggagagggcttctgggttagtttccacctcctgctttccaactcacggcgctttccttccggaaaggacgctggattcagggcgcgccagtacgcgcagtagcggcccgcgagtcggcaggtgggtagccccggcgcgggaggaaggggaagttaccttcccctcggaagagggcgctggctcccccatcctgcctttataataaggccaccggaggagaggaagcagccagctgccgtctgcgctttgcaaagcatgcagttaggggagcagctcttggtgagctcagtgaacctgcctggcgcgcacttctacccgctggagagtgcgcgaggcggcagcggcgggagcgctggccacctccccagcgcggccccctctcctcagaagttggacttagacaaagcgtccaagaagttttccggcagtctctcctgcgaggcggtgagcggggagcccgcagccgccagcgcaggggcccccgcggccatgcttagtgacaccgacgccggggacgcatttgccagcgctgcggcagtggccaagccggggcccccggacggccgcaagggctccccctgcggggaggaggagctgccctccgccgctgcagccgccgccgccgccgccgccgcggctgcggccactgcgcgctactccatggacagcctgagctccgagcggtactacctccagtcccccggtcctcaggggtcggagctggctgcgccctgctcactcttcccgtaccaggcggcggctggggcgccccacggacctgtgtacccggctcctaacggggcgcgctacccctacggctccatgctgccccccggcggcttccccgcggctgtgtgcccacccgggagggcgcagttcggcccaggagccggtgcgggcagtggcgcgggcggtagcagcggcgggggcggcggcccgggcacctatcagtacagccagggggctccgctctacgggccgtaccctggagccgcagcggcgggatcttgcggaggactggggggcctgggggttccaggttctggcttccgtgcccacgtctacctgtgcaaccggcctctgtggctcaaattccaccgccaccaaactgagatgatcattacgaaacagggcaggcgcatgtttcctttcttgagcttcaacataaacggactcaatcccactgcccactacaatgtgttcgtagaggtggtgctggcggaccccaaccactggcgcttccaggggggcaaatgggtgacctgtggcaaagccgacaataacatgcagggcaacaaaatgtatgttcacccagagtctcctaatactggttcccactggatgagacaggagatttcattcgggaaattaaaactcaccaataacaaaggcgcaaataacaacaacacccagatgatagtcttacaatccttacacaaataccaaccccgactgcatattgttgaagttacagaggatggcgtggaggacttgaatgagccctcaaagacccagacttttaccttctcagaaacgcaattcattgcagtgactgcctaccaaaacaccgatattactcaactaaagattgatcataacccctttgcaaaaggcttcagagacaactatgattccatgtacaccgcttcagaaaatgacaggttaactccatctcccacggattctcctagatcccatcagattgtccctggaggtcggtacggcgttcaatccttcttcccggagccctttgtcaacactttacctcaagcccgctattataatggcgagagaaccgtgccacagaccaacggcctcctttcaccccaacagagcgaagaggtggccaaccctccccagcggtggcttgtcacgcctgtccagcaacctgggaccaacaaactagacatcagttcctatgaatctgaatatacttctagcacattgctcccatatggcattaaatccttgccccttcagacatcccatgccctggggtattacccagacccaacctttcctgcaatggcagggtggggaggtcgaggttcttaccagaggaagatggcagctggactaccatggacctccagaacaagccccactgtgttctctgaagatcagctctccaaggagaaagtgaaagaggaaattggctcttcttggatagagacacccccttccatcaaatctctagattccaatgattcaggagtatacaccagtgcttgtaagcgaaggcggctgtctcctagcaactccagtaatgaaaattcaccctccataaagtgtgaggacattaatgctgaagagtatagtaaagacacctcaaaaggcatgggagggtattatgctttttacacaactccctaaagagttattttaacctcaaaaattagctaactttttgcagatggacttggtggtgttttttgttgtcttctttgcctaggttgccaaaaagatgtttgccttccaccttgatgcatcctgttttgtgcaattctctaaaagaaggtgccaaagctttttgattgctgcaggtaactgaaacaaacctagcatttttaaaaaataagattaatggaagactttaaggtattttaaaattcgaagggtatccaaggttctgtatttatttattggggagacactaacccttcaaagaagcaggctgtgaacattgggtgcccagtgctatcagatgagttaaaacctttgattctcatttctatttgtaaattcttaagcaaatagaagccgagtgttaaggtgttttgcttctgaaagagggctgtgccttccgtttcagaaggagacattttgctgttacattctgccaggggcaaaagatactaggcccaggagtcaagaaaagcttttgtgaaagtgatagtttcacctgactttgattccttaacccccggcttttggaacaagccatgtttgccctagtccaggattgcctcacttgagacttgctaggcctctgctgtgtgctggggtggccagtgggactcaggagagagcaagctaaggagtcaccaaaaaaaaaaaaaaaaaaaagggagaatttaaaagtgtacagttgtgtgtttagatacactatagaataatgtggtatatattgtacaaatagtctacataggtgtctgggataatgtaaaactggtgctttggctttgtaaagaatttgcaaatcacttaacagctgcaggggcaaggggagagtttcatcatccccatgatatttgggaatattctgtttacttcttagatagttaagaatgtattcagctactatgtactaacttgaaccgtgtttaaggaaaactcctatttcatcctcttcttgcgccatcccctctccctaacttggtaatgtgaagaaactaaaacctgataccacagctcctataggcattttagagatcttggatttttatgtacagtcttagtcatttttaataaatgtggttcagtaagggaacggaaaaaaaaaaaaaaa

SEQ ID NO: 184 - protein, 551 aa, Homo sapiens
MAAPALSWRLPLLILLLPLATSWASAAVNGTSQFTCFYNSRANISCVWSQDGALQDTSCQVHAWPDRRRWNQTCELLPVSQASWACNLILGAPDSQKLTTVDIVTLRVLCREGVRWRVMAIQDFKPFENLRLMAPISLQVVHVETHRCNISWEISQASHYFERHLEFEARTLSPGHTWEEAPLLTLKQKQEWICLETLTPDTQYEFQVRVKPLQGEFTTWSPWSQPLAFRTKPAALGKDTIPWLGHLLVGLSGAFGFIILVYLLINCRNTGPWLKKVLKCNTPDPSKFFSQLSSEHGGDVQKWLSSPFPSSSFSPGGLAPEISPLEVLERDKVTQLLLQQDKVPEPASLSSNHSLTSCFTNQGYFFFHLPDALEIEACQVYFTYDPYSEEDPDEGVAGAPTGSSPQPLQPLSGEDDAYCTFPSRDDLLLFSPSLLGGPSPPSTAPGGSGAGEERMPPSLQERVPRDWDPQPLGPPTPGVPDLVDFQPPPELVLREAGEEVPDAGPREGVSFPWSRPPGQGEFRALNARLPLNTDAYLSLQELQGQDPTHLV

SEQ ID NO: 185 - DNA, 4050 bp, Homo sapiens
gcagccagagctcagcagggccctggagagatggccacggtcccagcaccggggaggactggagagcgcgcgctgccaccgccccatgtctcagccagggcttccttcctcggctccaccctgtggatgtaatggcggcccctgctctgtcctggcgtctgcccctcctcatcctcctcctgcccctggctacctcttgggcatctgcagcggtgaatggcacttcccagttcacatgcttctacaactcgagagccaacatctcctgtgtctggagccaagatggggctctgcaggacacttcctgccaagtccatgcctggccggacagacggcggtggaaccaaacctgtgagctgctccccgtgagtcaagcatcctgggcctgcaacctgatcctcggagccccagattctcagaaactgaccacagttgacatcgtcaccctgagggtgctgtgccgtgagggggtgcgatggagggtgatggccatccaggacttcaagccctttgagaaccttcgcctgatggcccccatctccctccaagttgtccacgtggagacccacagatgcaacataagctgggaaatctcccaagcctcccactactttgaaagacacctggagttcgaggcccggacgctgtccccaggccacacctgggaggaggcccccctgctgactctcaagcagaagcaggaatggatctgcctggagacgctcaccccagacacccagtatgagtttcaggtgcgggtcaagcctctgcaaggcgagttcacgacctggagcccctggagccagcccctggccttcaggacaaagcctgcagcccttgggaaggacaccattccgtggctcggccacctcctcgtgggcctcagcggggcttttggcttcatcatcttagtgtacttgctgatcaactgcaggaacaccgggccatggctgaagaaggtcctgaagtgtaacaccccagacccctcgaagttcttttcccagctgagctcagagcatggaggagacgtccagaagtggctctcttcgcccttcccctcatcgtccttcagccctggcggcctggcacctgagatctcgccactagaagtgctggagagggacaaggtgacgcagctgctcctgcagcaggacaaggtgcctgagcccgcatccttaagcagcaaccactcgctgaccagctgcttcaccaaccagggttacttcttcttccacctcccggatgccttggagatagaggcctgccaggtgtactttacttacgacccctactcagaggaagaccctgatgagggtgtggccggggcacccacagggtcttccccccaacccctgcagcctctgtcaggggaggacgacgcctactgcaccttcccctccagggatgacctgctgctcttctcccccagtctcctcggtggccccagccccccaagcactgcccctgggggcagtggggccggtgaagagaggatgcccccttctttgcaagaaagagtccccagagactgggacccccagcccctggggcctcccaccccaggagtcccagacctggtggattttcagccaccccctgagctggtgctgcgagaggctggggaggaggtccctgacgctggccccagggagggagtcagtttcccctggtccaggcctcctgggcagggggagttcagggcccttaatgctcgcctgcccctgaacactgatgcctacttgtccctccaagaactccagggtcaggacccaactcacttggtgtagacagatggccagggtgggaggcaggcagctgcctgctctgcgccgagcctcagaaggaccctgttgagggtcctcagtccactgctgaggacactcagtgtccagttgcagctggacttctccacccggatggcccccacccagtcctgcacacttggtccatccatttccaaacctccactgctgctcccgggtcctgctgcccgagccaggaactgtgtgtgttgcaggggggcagtaactccccaactccctcgttaatcacaggatcccacgaatttaggctcagaagcatcgctcctctccagccctgcagctattcaccaatatcagtcctcgcggctctccagggctccctgccctgacctcttccctgggttttctgccccagcctcctccttccctcccctccccgtccacagggcagcctgagcgtgctttccaaaacccaaatatggccacgctccccctcggttcaaaaccttgcacaggtcccactgccctcagccccacttctcagcctggtacttgtacctccggtgtcgtgtggggacatccccttctgcaatcctccctaccgtcctcctgagccactcagagctccctcacaccccctctgttgcacatgctattccctggggctgctgtgcgctccccctcatctaggtgacaaacttccctgactcttcaagtgccggttttgcttctcctggagggaagcactgcctcccttaatctgccagaaacttctagcgtcagtgctggagggagaagctgtcagggacccagggcgcctggagaaagaggccctgttactattcctttgggatctctgaggcctcagagtgcttggctgctgtatctttaatgctggggcccaagtaagggcacagatccccccacaaagtggatgcctgctgcatcttcccacagtggcttcacagacccacaagagaagctgatggggagtaaaccctggagtccgaggcccaggcagcagccccgcctagtggtgggccctgatgctgccaggcctgggacctcccactgccccctccactggaggggtctcctctgcagctcagggactggcacactggcctccagaagggcagctccacagggcagggcctcattatttttcactgccccagacacagtgcccaacaccccgtcgtataccctggatgaacgaattaattacctggcaccacctcgtctgggctccctgcgcctgacattcacacagagaggcagagtcccgtgcccattaggtctggcatgccccctcctgcaaggggctcaaccccctaccccgacccctccacgtatctttcctaggcagatcacgttgcaatggctcaaacaacattccaccccagcaggacagtgaccccagtcccagctaactctgacctgggagccctcaggcacctgcacttacaggccttgctcacagctgattgggcacctgaccacacgcccccacaggctctgaccagcagcctatgagggggtttggcaccaagctctgtccaatcaggtaggctgggcctgaactagccaatcagatcaactctgtcttgggcgtttgaactcagggagggaggcccttgggagcaggtgcttgtggacaaggctccacaagcgttgagccttggaaaggtagacaagcgttgagccactaagcagaggaccttgggttcccaatacaaaaatacctactgctgagagggctgctgaccatttggtcaggattcctgttgcctttatatccaaaataaactcccctttcttgaggttgtctgagtcttgggtctatgccttgaaaaaagctgaattattggacagtctcacctcctgccatagggtcctgaatgtttcagaccacaaggggctccacacctttgctgtgtgttctggggcaacctactaatcctctctgcaagtcggtctccttatccccccaaatggaaattgtatttgccttctccactttgggaggctcccacttcttgggagggttacattttttaagtcttaatcatttgtgacatatgtatctatacatccgtatcttttaatgatccgtgtgtaccatctttgtgattatttccttaatattttttctttaagtcagttcattttcgttgaaatacatttatttaaagaaaaatctttgttactctgtaaatgaaaaaacccattttcgctataaataaaaggtaactgtacaaaataagtacaatgcaacaaaaaaaaa

SEQ ID NO: 186 - protein, 281 aa, Homo sapiens
MQQPFNYPYPQIYWVDSSASSPWAPPGTVLPCPTSVPRRPGQRRPPPPPPPPPLPPPPPPPPLPPLPLPPLKKRGNHSTGLCLLVMFFMVLVALVGLGLGMFQLFHLQKELAELRESTSQMHTASSLEKQIGHPSPPPEKKELRKVAHLTGKSNSRSMPLEWEDTYGIVLLSGVKYKKGGLVINETGLYFVYSKVYFRGQSCNNLPLSHKVYMRNSKYPQDLVMMEGKMMSYCTTGQMWARSSYLGAVFNLTSADHLYVNVSELSLVNFEESQTFFGLYKL

SEQ ID NO: 187 - DNA, 1907 bp, Homo sapiens
agaatcagagagagagagatagagaaagagaaagacagaggtgtttcccttagctatggaaactctataagagagatccagcttgcctcctcttgagcagtcagcaacagggtcccgtccttgacacctcagcctctacaggactgagaagaagtaaaaccgtttgctggggctggcctgactcaccagctgccatgcagcagcccttcaattacccatatccccagatctactgggtggacagcagtgccagctctccctgggcccctccaggcacagttcttccctgtccaacctctgtgcccagaaggcctggtcaaaggaggccaccaccaccaccgccaccgccaccactaccacctccgccgccgccgccaccactgcctccactaccgctgccacccctgaagaagagagggaaccacagcacaggcctgtgtctccttgtgatgtttttcatggttctggttgccttggtaggattgggcctggggatgtttcagctcttccacctacagaaggagctggcagaactccgagagtctaccagccagatgcacacagcatcatctttggagaagcaaataggccaccccagtccaccccctgaaaaaaaggagctgaggaaagtggcccatttaacaggcaagtccaactcaaggtccatgcctctggaatgggaagacacctatggaattgtcctgctttctggagtgaagtataagaagggtggccttgtgatcaatgaaactgggctgtactttgtatattccaaagtatacttccggggtcaatcttgcaacaacctgcccctgagccacaaggtctacatgaggaactctaagtatccccaggatctggtgatgatggaggggaagatgatgagctactgcactactgggcagatgtgggcccgcagcagctacctgggggcagtgttcaatcttaccagtgctgatcatttatatgtcaacgtatctgagctctctctggtcaattttgaggaatctcagacgtttttcggcttatataagctctaagagaagcactttgggattctttccattatgattctttgttacaggcaccgagaatgttgtattcagtgagggtcttcttacatgcatttgaggtcaagtaagaagacatgaaccaagtggaccttgagaccacagggttcaaaatgtctgtagctcctcaactcacctaatgtttatgagccagacaaatggaggaatatgacggaagaacatagaactctgggctgccatgtgaagagggagaagcatgaaaaagcagctaccaggtgttctacactcatcttagtgcctgagagtatttaggcagattgaaaaggacaccttttaactcacctctcaaggtgggccttgctacctcaagggggactgtctttcagatacatggttgtgacctgaggatttaagggatggaaaaggaagactagaggcttgcataataagctaaagaggctgaaagaggccaatgccccactggcagcatcttcacttctaaatgcatatcctgagccatcggtgaaactaacagataagcaagagagatgttttggggactcatttcattcctaacacagcatgtgtatttccagtgcaattgtaggggtgtgtgtgtgtgtgtgtgtgtgtgtgtgtgtatgactaaagagagaatgtagatattgtgaagtacatattaggaaaatatgggttgcatttggtcaagattttgaatgcttcctgacaatcaactctaatagtgcttaaaaatcattgattgtcagctactaatgatgttttcctataatataataaatatttatgtagatgtgcatttttgtgaaatgaaaacatgtaataaaaagtatatgttaggatacaaaaaaaaaaaaa

SEQ ID NO: 188 - protein, 332 aa, Homo sapiens
MLWLFQSLLFVFCFGPGNVVSQSSLTPLMVNGILGESVTLPLEFPAGEKVNFITWLFNETSLAFIVPHETKSPEIHVTNPKQGKRLNFTQSYSLQLSNLKMEDTGSYRAQISTKTSAKLSSYTLRILRQLRNIQVTNHSQLFQNMTCELHLTCSVEDADDNVSFRWEALGNTLSSQPNLTVSWDPRISSEQDYTCIAENAVSNLSFSVSAQKLCEDVKIQYTDTKMILFMVSGICIVFGFIILLLLVLRKRRDSLSLSTQRTQGPAESARNLEYVSVSPTNNTVYASVTHSNRETEIWTPRENDTITIYSTINHSKESKPTFSRATALDNVV

SEQ ID NO: 189 - DNA, 2754 bp, Homo sapiens
agtttatgacagaagggcaaaaacattgactgcctcaaggtctcaagcaccagtcttcaccgcggaaagcatgttgtggctgttccaatcgctcctgtttgtcttctgctttggcccagggaatgtagtttcacaaagcagcttaaccccattgatggtgaacgggattctgggggagtcagtaactcttcccctggagtttcctgcaggagagaaggtcaacttcatcacttggcttttcaatgaaacatctcttgccttcatagtaccccatgaaaccaaaagtccagaaatccacgtgactaatccgaaacagggaaagcgactgaacttcacccagtcctactccctgcaactcagcaacctgaagatggaagacacaggctcttacagagcccagatatccacaaagacctctgcaaagctgtccagttacactctgaggatattaagacaactgaggaacatacaagttaccaatcacagtcagctatttcagaatatgacctgtgagctccatctgacttgctctgtggaggatgcagatgacaatgtctcattcagatgggaggccttgggaaacacactttcaagtcagccaaacctcactgtctcctgggaccccaggatttccagtgaacaggactacacctgcatagcagagaatgctgtcagtaatttatccttctctgtctctgcccagaagctttgcgaagatgttaaaattcaatatacagataccaaaatgattctgtttatggtttctgggatatgcatagtcttcggtttcatcatactgctgttacttgttttgaggaaaagaagagattccctatctttgtctactcagcgaacacagggccccgcagagtccgcaaggaacctagagtatgtttcagtgtctccaacgaacaacactgtgtatgcttcagtcactcattcaaacagggaaacagaaatctggacacctagagaaaatgatactatcacaatttactccacaattaatcattccaaagagagtaaacccactttttccagggcaactgcccttgacaatgtcgtgtaagttgctgaaaggcctcagaggaattcgggaatgacacgtcttctgatcccatgagacagaacaaagaacaggaagcttggttcctgttgttcctggcaacagaatttgaatatctaggataggatgatcacctccagtccttcggacttaaacctgcctacctgagtcaaacacctaaggataacatcatttccagcatgtggttcaaataatattttccaatccacttcaggccaaaacatgctaaagataacacaccagcacattgactctctctttgataactaagcaaatggaattatggttgacagagagtttatgatccagaagacaaccacttctctccttttagaaagcagcaggattgacttattgagaaataatgcagtgtgttggttacatgtgtagtctctggagttggatgggcccatcctgatacaagttgagcatcccttgtctgaaatgcttgggattagaaatgtttcagatttcaattttttttcagattttggaatatttgcattatatttagcggttgagtatccaaatccaaaaatccaaaattcaaaatgctccaataagcatttcccttgagtttcattgatgtcgatgcagtgctcaaaatctcagattttggagcattttggatattggatttttggatttgggatgctcaacttgtacaatgtttattagacacatctcctgggacatactgcctaaccttttggagccttagtctcccagactgaaaaaggaagaggatggtattacatcagctccattgtttgagccaagaatctaagtcatccctgactccagtgtctttgtcaccaggccctttggactctacctcagaaatatttcttggaccttccacttctcctccaactccttgaccaccatcctgtatccaaccatcaccacctctaacctgaatcctaccttaagatcagaacagttgtcctcacttttgttcttgtccctctccaacccactctccacaagatggccagagtaatgtttttaatataaattggatccttcagtttcctgcttaaaaccctgcaggtttcccaatgcactcagaaagaaatccagtttccatggccctggatggtctggcccacctccagcctcagctagcattacccttctgacactctctatgtagcctccctgatcttctttcagctcctctattaaaggaaaagttctttatgttaattatttacatcttcctgcaggcccttcctctgcctgctggggtcctcctattctttaggtttaattttaaatatgtcacctcctaagagaaaccttcccagaccactctttctaaaatgaatcttctaggctgggcatggtggctcacacctgtaatccctgtactttgggaggccaaggggggagatcacttgaggtcaggagttcaagaccagcctggccaacttggtgaaaccccgtctttactaaaaatacaaaaaaattagccaggcgtggtggtgcacccctaaaatcccagctacttgagagactgaggcaggagaatcgcttgaacccaggaggtggaggttccagtgagccaaaatcatgccaatgtattccagtctgggtgacagagtgagactctgtctcaaaaaataaataaataaaataaaatgaaatagatcttataaaaaaaa

SEQ ID NO: 190 - protein, 335 aa, Homo sapiens
MGKVKVGVNGFGRIGRLVTRAAFNSGKVDIVAINDPFIDLNYMVYMFQYDSTHGKFHGTVKAENGKLVINGNPITIFQERDPSKIKWGDAGAEYVVESTGVFTTMEKAGAHLQGGAKRVIISAPSADAPMFVMGVNHEKYDNSLKIISNASCTTNCLAPLAKVIHDNFGIVEGLMTTVHAITATQKTVDGPSGKLWRDGRGALQNIIPASTGAAKAVGKVIPELNGKLTGMAFRVPTANVSVVDLTCRLEKPAKYDDIKKVVKQASEGPLKGILGYTEHQVVSSDFNSDTHSSTFDAGAGIALNDHFVKLISWYDNEFGYSNRVVDLMAHMASKE

SEQ ID NO: 191 - DNA, 1421 bp, Homo sapiens
gcctcaagaccttgggctgggactggctgagcctggcgggaggcggggtccgagtcaccgcctgccgccgcgcccccggtttctataaattgagcccgcagcctcccgcttcgctctctgctcctcctgttcgacagtcagccgcatcttcttttgcgtcgccagccgagccacatcgctcagacaccatggggaaggtgaaggtcggagtcaacggatttggtcgtattgggcgcctggtcaccagggctgcttttaactctggtaaagtggatattgttgccatcaatgaccccttcattgacctcaactacatggtttacatgttccaatatgattccacccatggcaaattccatggcaccgtcaaggctgagaacgggaagcttgtcatcaatggaaatcccatcaccatcttccaggagcgagatccctccaaaatcaagtggggcgatgctggcgctgagtacgtcgtggagtccactggcgtcttcaccaccatggagaaggctggggctcatttgcaggggggagccaaaagggtcatcatctctgccccctctgctgatgcccccatgttcgtcatgggtgtgaaccatgagaagtatgacaacagcctcaagatcatcagcaatgcctcctgcaccaccaactgcttagcacccctggccaaggtcatccatgacaactttggtatcgtggaaggactcatgaccacagtccatgccatcactgccacccagaagactgtggatggcccctccgggaaactgtggcgtgatggccgcggggctctccagaacatcatccctgcctctactggcgctgccaaggctgtgggcaaggtcatccctgagctgaacgggaagctcactggcatggccttccgtgtccccactgccaacgtgtcagtggtggacctgacctgccgtctagaaaaacctgccaaatatgatgacatcaagaaggtggtgaagcaggcgtcggagggccccctcaagggcatcctgggctacactgagcaccaggtggtctcctctgacttcaacagcgacacccactcctccacctttgacgctggggctggcattgccctcaacgaccactttgtcaagctcatttcctggtatgacaacgaatttggctacagcaacagggtggtggacctcatggcccacatggcctccaaggagtaagacccctggaccaccagccccagcaagagcacaagaggaagagagagaccctcactgctggggagtccctgccacactcagtcccccaccacactgaatctcccctcctcacagttgccatgtagaccccttgaagaggggaggggcctagggagccgcaccttgtcatgtaccatcaataaagtaccctgtgctcaaccagttaaaaaaaaaaaaaaaaaaaaa

SEQ ID NO: 192 - protein, 218 aa, Homo sapiens
MATRSPGVVISDDEPGYDLDLFCIPNHYAEDLERVFIPHGLIMDRTERLARDVMKEMGGHHIVALCVLKGGYKFFADLLDYIKALNRNSDRSIPMTVDFIRLKSYCNDQSTGDIKVIGGDDLSTLTGKNVLIVEDIIDTGKTMQTLLSLVRQYNPKMVKVASLLVKRTPRSVGYKPDFVGFEIPDKFVVGYALDYNEYFRDLNHVCVISETGKAKYKA

SEQ ID NO: 193 - DNA, 1435 bp, Homo sapiens
ggcggggcctgcttctcctcagcttcaggcggctgcgacgagccctcaggcgaacctctcggctttcccgcgcggcgccgcctcttgctgcgcctccgcctcctcctctgctccgccaccggcttcctcctcctgagcagtcagcccgcgcgccggccggctccgttatggcgacccgcagccctggcgtcgtgattagtgatgatgaaccaggttatgaccttgatttattttgcatacctaatcattatgctgaggatttggaaagggtgtttattcctcatggactaattatggacaggactgaacgtcttgctcgagatgtgatgaaggagatgggaggccatcacattgtagccctctgtgtgctcaaggggggctataaattctttgctgacctgctggattacatcaaagcactgaatagaaatagtgatagatccattcctatgactgtagattttatcagactgaagagctattgtaatgaccagtcaacaggggacataaaagtaattggtggagatgatctctcaactttaactggaaagaatgtcttgattgtggaagatataattgacactggcaaaacaatgcagactttgctttccttggtcaggcagtataatccaaagatggtcaaggtcgcaagcttgctggtgaaaaggaccccacgaagtgttggatataagccagactttgttggatttgaaattccagacaagtttgttgtaggatatgcccttgactataatgaatacttcagggatttgaatcatgtttgtgtcattagtgaaactggaaaagcaaaatacaaagcctaagatgagagttcaagttgagtttggaaacatctggagtcctattgacatcgccagtaaaattatcaatgttctagttctgtggccatctgcttagtagagctttttgcatgtatcttctaagaattttatctgttttgtactttagaaatgtcagttgctgcattcctaaactgtttatttgcactatgagcctatagactatcagttccctttgggcggattgttgtttaacttgtaaatgaaaaaattctcttaaaccacagcactattgagtgaaacattgaactcatatctgtaagaaataaagagaagatatattagttttttaattggtattttaatttttatatatgcaggaaagaatagaagtgattgaatattgttaattataccaccgtgtgttagaaaagtaagaagcagtcaattttcacatcaaagacagcatctaagaagttttgttctgtcctggaattattttagtagtgtttcagtaatgttgactgtattttccaacttgttcaaattattaccagtgaatctttgtcagcagttcccttttaaatgcaaatcaataaattcccaaaaatttaaaaaaaaaaaaaaaaaaaaaa

SEQ ID NO: 194 - protein, 853 aa, Homo sapiens
MPSTNRAGSLKDPEIAELFFKEDPEKLFTDLREIGHGSFGAVYFARDVRTNEVVAIKKMSYSGKQSTEKWQDIIKEVKFLQRIKHPNSIEYKGCYLREHTAWLVMEYCLGSASDLLEVHKKPLQEVEIAAITHGALQGLAYLHSHTMIHRDIKAGNILLTEPGQVKLADFGSASMASPANSFVGTPYWMAPEVILAMDEGQYDGKVDVWSLGITCIELAERKPPLFNMNAMSALYHIAQNESPTLQSNEWSDYFRNFVDSCLQKIPQDRPTSEELLKHIFVLRERPETVLIDLIQRTKDAVRELDNLQYRKMKKLLFQEAHNGPAVEAQEEEEEQDHGVGRTGTVNSVGSNQSIPSMSISASSQSSSVNSLPDVSDDKSELDMMEGDHTVMSNSSVIHLKPEEENYREEGDPRTRASDPQSPPQVSRHKSHYRNREHFATIRTASLVTRQMQEHEQDSELREQMSGYKRMRRQHQKQLMTLENKLKAEMDEHRLRLDKDLETQRNNFAAEMEKLIKKHQAAMEKEAKVMSNEEKKFQQHIQAQQKKELNSFLESQKREYKLRKEQLKESKELQIKKQFQDTCKIQTRQYKALRNHLLETTPKSEHKAVLKRLKEEQTRKLAILAEQYDHSINEMLSTQALRLDEAQEAECQVLKMQLQQELELLNAYQSKIKMQAEAQHDRELRELEQRVSLRRALLEQKIEEEMLALQNERTERIRSLLERQAREIEAFDSESMRLGFSNMVLSNLSPEAFSHSYPGASGWSHNPTGGPGPHWGHPMGGPPQAWGHPMQGGPQPWGHPSGPMQGVPRGSSMGVRNSPQALRRTASGGRTEQGMSRSTSVTSQISNGSHMSYT

SEQ ID NO: 195 - DNA, 11652 bp, Homo sapiens
cccctcctcctcctcactcctcaccctccagggtagcggctaccggagcgctgcagggggctgcgcctgcctgctccgccccagacctgtcggcgaaaggtagtttatgccaacgtgacttcattcatacagatgaaccaaggatcgggatagcagtataaaattagaatcaagacagctgactgctcagcaggatgccatcaactaacagagcaggcagcctgaaggaccctgaaattgcagagctcttcttcaaagaagatccagagaagctcttcacagatctcagagaaattggccatggaagctttggagcagtgtattttgcacgagatgtgcgtaccaatgaagtggtggccatcaagaaaatgtcttatagtggaaagcagtctactgagaaatggcaggatattattaaggaagtcaagtttctacaaagaataaaacatcccaacagtatagaatacaaaggctgttatttacgtgaacacacagcatggcttgtaatggaatattgtttaggatctgcttcggatttactagaagttcacaaaaagccattacaagaagtggaaatagcagcaattacacatggtgctcttcagggattagcctacttacattctcatactatgattcatagagatatcaaagcaggaaatatccttctgacagaaccaggccaggtgaaacttgctgactttggctctgcttccatggcatcacctgccaattcctttgtgggaacgccgtattggatggccccagaagtaattttagccatggatgaaggacaatatgatggcaaagtagatgtgtggtctcttggaataacatgtattgaactagcggaaaggaagcctcctttatttaatatgaatgcaatgagtgccttatatcacatagcccaaaatgaatcccctacactacagtctaatgaatggtctgattattttcgcaactttgtagattcttgcctccagaaaatccctcaagatcgacctacatcagaggaacttttaaagcacatatttgttcttcgggagcgccctgaaaccgtgttaatagatctcattcagaggacaaaggatgcagtaagagagctggacaatctgcagtatcgaaagatgaagaaactccttttccaggaggcacataatggaccagcagtagaagcacaggaagaagaagaggaacaagatcatggtgttggccggacaggaacagttaatagtgttggaagtaatcaatccattcccagcatgtccatcagtgccagcagccaaagcagtagtgttaacagtcttccagatgtctcagatgacaagagtgagctagacatgatggagggagaccacacagtgatgtctaacagttctgttatccatttaaaaccagaggaagaaaattacagagaagagggagatcctagaacaagagcatcagatccacaatctccaccccaagtatctcgtcacaaatcacactatcgtaatcgagaacactttgctactatacggacagcatcactggttacgaggcaaatgcaagaacatgagcaggactctgagcttagagaacaaatgtctggctataagcgaatgaggcgacaacatcaaaagcaactgatgactctggaaaacaagctaaaggctgagatggatgaacatcgcctcagattagacaaagatcttgaaactcagcgtaacaattttgctgcagaaatggagaaacttatcaagaaacaccaggctgccatggagaaagaggctaaagtgatgtccaatgaagagaaaaaatttcagcaacatattcaggcccaacagaagaaagaactgaatagttttctcgagtcccagaaaagagagtataaacttcgaaaagagcagcttaaagagtctaaagaactccaaataaaaaagcagtttcaggatacctgcaaaatccaaaccagacagtacaaagcattaagaaatcacctgctggagactacaccaaagagtgagcacaaagctgttctgaaacggctcaaggaggaacagacccggaaattagctatcttggctgagcagtatgatcacagcattaatgaaatgctctccacacaagccctgcgtttggatgaagcacaggaagcagagtgccaggttttgaagatgcagctgcagcaggaactggagctgttgaatgcgtatcagagcaaaatcaagatgcaagctgaggcacaacatgatcgagagcttcgcgagcttgaacagagggtctccctccggagggcactcttagaacaaaagattgaagaagagatgttggctttgcagaatgagcgcacagaacgaatacgaagcctgttggaacgtcaagccagagagattgaagcttttgactctgaaagcatgagactaggttttagtaatatggtcctttctaatctctcccctgaggcattcagccacagctacccgggagcttctggttggtcacacaaccctactgggggtccaggacctcactggggtcatcccatgggtggcccaccacaagcttggggccatccaatgcaaggtggaccccagccatggggtcacccttcagggccaatgcaaggggtacctcgaggtagcagtatgggagtccgcaatagcccccaggctctgaggcggacagcttctgggggacggacggagcagggcatgagcagaagcacgagtgtcacttcacaaatatccaatgggtcacacatgtcttatacataacttaataattgagagtggcaattccgctggagctgtctgccaaaagaaactgcctacagacatcatcacagcagcctcctcacttgggtactacagtgtggaagctgagtgcatatggtatattttattcatttttgtaaagcgttctgttttgtgtttactaattgggatgtcatagtacttggctgccgggtttgtttgtttttggggaaattttgaaaagtggagttgatattaaaaataaatgtgtatgtgtgtacatatatatacacacacatacacatatattatgcatgtggtgaaaagaattggctagataggggatttttctgaacactgcaaaaatagaacgtagcaaaatggcttcagttatcacttttgggtgtctgtatcctaagaagtttctgaaaagatctaaagcctttttatcccatatcccaaattcttatgagccactcacagcaggcagcatatgttgaaataagttattactggtacacacctgcattgcctcaccagtgtatttatttgttattaaattgatctgacttctcagcctcatttggactaaaaaaagaaagcagaaatccatgaacacattgcttctcggccttttggctaagatcaagtgtagaaatccatgaacactaaaggacttcattgattttttcagagagtagaaaacaacttagtttttcttttttcctgaatgcgtcataggcttgtgagtgatttttgtccattcaattgtgccttctttgtattatgataagatgggggtacttaaggagatcacaagttgtgtgaggattgcattaacaaacctatgagccttcaatggggaagaccagaagggtgagaggggccctgaaagttcatatggtgggtatgtcccgcagcagagtgaggagatgaagcttacgtgtcctgacgttttgttgcttatactgtgatatctcatcctagctaagctctataatgcccaagaccccaaacagtacttttactttgtttgtacaaaaacaaagacatatagccaatacaaatcaaatgccggaggtgtttgatgccatatttgcaaattgccatctattgaaattctcgtcacactacatagacataattgttatctccttttggcttatgtgattttctgtttacaagtagaatagccaattatttaaatgtttagttgccacagtgaaccaggagtcactgagccaatgactttaccagctgctgactaatcttcatcaccactgtagattttgctgcatgtgcaggtcctctatttttaattgctgttttcgttgctgcagtactttacaaacttctagttcgttgagacttagtgaccatttggcatcaagttaacatcacacaataggaaacaccacttccacaagtctcaagcctcagtgctaaagtactactgaaaaggaactaggaagtttggccaattaaaaaaaaaaagtaaaataagttatagtggtcagggaatctcttgacgaaagctaactcttatttttcagggggcacatgttttgttttgttatgttttgttgtacaatgaaggatgaacccaatgctaaaaagtcagttattttcttggttttccatttcttgtatataaattgtgttggaggtgggtaggaagctgtgagtatgacttgaagaaaaatatccttttcagtgacaaatcagagtttcttacaagttattgtcctgctcccttccaagttgtcttgaagaatccttgctgctaactctggatcctgcttttcctatagtcagagggctccaaggtagaactctctaagtccctctcaatggcactctttgcctagaccaaactaatgaccaaacagtaatcaatctatcactgttgaagtcctggttttctcaaccaaattttaagtctttcccaggtatgtcagtcgagttgccatgaatcctcacctgtaggagtttctgggattcattttaaggaaactggaagaaaattaatgttttaatgtaaatgtttttaaaaccaagatcaccatagagttcacacaaaattttaggcagtgtttcaagaagcactcttatgtgttgttctttcagcccatgctccaggtcaccggtttttaggtaaacatgacatgacatgtacttgtaatatcagtgaaaggggcttttagtcgtctcagtatcttttttgcattcaggtattatagcgtttccaacaaattgagaaattacttatttggtgtaaaatgacgagagagctttagaatttaataaaatgtcaaaaatacaatttgatacccttaaaaattattcatagatctggctgctctgtactactggatgggtggaatagggaagcagatcacttttgcatacaaaaactctttcaaacccaaaatattattggtggtacattttaaagtccaattgtggacttaaattagtcaaattgagagttactgagtccattcagatctccagtagggttttgtatctaatgtatttggccaccagttttacatgtaggtcatgactatacctggattttatcattaagttaactttaaagtatatacagtttgcaaaaaatgattcaaattaattggtttgtatatgtttgtgagatctagcttctgaggaatctcatacatagtaggaaccatcatagagtaaagcttgtagcagaaaaattggaagggttttgagatatcctagagaaagagcaagcactttctgaatcagtggggaaatatcaatatttgatcaaattaacactacctccttcccagtgttggtgttcactcactatatgtctttaagaaaattaaaactatggaaaatttgtctagcatatcagaagttgtaaatgctatatctggtatccagaggctggctgtaaaaagttccttggggtcactctatctcacattttttttggttagcattttaaaaatgcaaagccacatactttgaaatatattattccaaattgagctcccttccctttgcacatattttttcctccccttattgaagtcagctctaaccccaaattctagtatccaaaagtatttttatttgtataatgctatctgaaaaatgtgtttatattatattttcagagctgcaattcttattcgccatttcaatacctagagatagagagtcttgtatttgaagccacacacactggtgtaatatgcttagtactctaggtcaaggatttgttggtaaatggaacattttagcatagtcatgatttttggttgcctagacatcaggtaaacattcagtacactaaagaaactatcctggacactccctcctgcttccaccaatttttttctcacccccttttcaaaaattgaaaactctatgagtgtctttttgagaccataaagcagactttagtaactttctatttctgtaagtactaaatgtctggcattttaaacttttgtagaatacattatgttggacactggaataatactatttattttcacctgtgaaaaatgacttcattgtacttgaaacacctcctttgcatttctccatttgtgccattcactagtggaaataaattgtattataccatgatctactggctttttaaaactgtattaaatatgcacatttttggtatagctattatcatttgtatgtatatattgtatatacatatgagtgtctgtatgtgtgtatagatggatggatgtaactcatactgtacatttccatcagggcacttaaaagttctgttatttttgtttggttttgttatttcagtcctcagttaaggcaagaatgcatgtgtttcttaagaatgagtactctgcgttgatgtttatgagaaggtggtcattagatgcagtcttttcctttttaatcccctcttagcacttctgtgagtggagaggacattaagtaaaatttggaatcataagttgcaatgcagtaaaatggtgctggggaaggagccagttagtgtttctgtgagtttgtgttgtgatgcaataagagataagtaatgcagagagaaatgaaccatggaaagtaagaacactgatggtgattcctctgcaaagatgataagaaaaagaaccaataaatcacacaatctttatgtgctttctatatgtatttcttagtagtgataccattgatcctcttactttttttactccattaatactaataattatatactttgctgaggatcaaaacagccaagaaaggaattactgctaaagcatctaagattctcctgaactgtaaaatcaacaggaaatggccactgggagagaaggatttggtattgggtgaggggctttctccctttacctgcctcttcttgcttgctaatagtaagttctttgtgcaccttccaccacttctgagccactactattcaagtagagatttgccccaacacattaactttttccttggagatttatatggtcctgcattttgtcctgtgctcacaatgtgaagtgtcttctgtattcaaatcaaaaaataatatatttaaggtatataagtgtgaatctcctataatgatggaagaagaggttctcttgtcttagatagaaaagagccttctccaagagcaatgtcaaaacttgggctgtcatctttgagctgtttaccaaaatacagaccattattgaagaaaaacaaattatctattttgttttcccccatctaacatgatagtgcccccaaccaggttgtagcattgccttttaaaagagactcactcactcttagtttttaagaactggaaatttcccatcctcagatcccttaaaggatgaagagttggctgtacacttagcggacttgcctcttgtatgcaaggactactgattgaagtctgttttgctgtgtctggttatgttgtctgcacttttatgaaatcactacaataggtctgcattggaaatgactattaatttgtaaagaagtaagttttattaaacactgtctagaaaaagaaagtgaagctgagaactcttcctttattgtgcatttatattttctgctgaattccggtagttccctttaaagtcatgttgactaatgttttcctccttgtttgtattcagatttccaaaatttcactcatacaagggaagagactccatttagcttaacggtagtctttagatcataagaaatatataaattagtatgcaccttatctgcctgttgtgggtttcttaaacttgcacttcctacccacccaaagatagatatcctttaaagaaaataaaggcagagaattaaaactggggagccatttactatgtcaccatcactgttaactgtttcccagcaatctaaactttttgaagtttcagaggtgtattttttttttgtatatatgtctgtgtgattgtattgttttgtttctaaatatacaaggaattctttaaatagagaaaaaggttaatcctcactgaaacaccaggatgcccactggatatactaatctgaacatctgtaggtagtttgtcatgaaaaagtggagagaagatgagacttttgaatgaatgaaaaagggtatcttgatacccagaattccccccaaagtacgggtaattcaacctgcacagttttctttcactcaaagtgttcagcacttgtgagtgaaaaatcatgtaattatctgtaaatatgtagctaacaaattgacctagtttctgtatttttttgtttttgtactaaagtttataggtctgtgccagctagagagaagttgctgtcattaccagttgtggtcctagcatctaaccctgaaaccatcctaggtgacatttttagaattaatacttaaatgttaaacagggggaaatgaagcttaatcatggtcaggtttgagatcttttgcagtgaaataattttatttaatataaatgatcacatgtcctcaatcatgaatgaggtagggagcctctctcccccagtggccatgtttacaaaagtgtgttttgtctataaagtgcaagtgttttaatgtttatgtaaattatgcaggtgataacatggtttggaactgtttattgggctctttaactgaattttcaaatgaaatgaactatgcttattgctggcacattgatcccatttctggaacatttttcctatttccagagttacatatgttcttttgtcattacccaatttaacctccctttctctgatatgccttgtagccaaagtattaaaggctgatgaacatagacaagggaaatgcatttcttagaaatccgtgaaccctcagttgtatgctttcagtactcgtgttaatatgtttctatggcaactctgaggtcagtggtttagaaatgagataccagtgttaatgaaaagtgtgtgctctttgcttttgcatggcttggcttagtatccaaggtatattagggccacttgaaagcatgaagaccagttatatagggaacaggtttctctcagtggcacattttgctttttctgagccccaaatacattgcctgggcatgaacattgttaccgtaaattgcacatggtcatggactgaattatgtgactttaaaggatgtaactgcccaacatttgcagattctgggtggtctatgtgaccatttgtctcgtatccaaaaaccccggggctattggaacccttccaacactttttcctttgtcatagacaagtttatatataacttaccaagatgttggctgtcctggtgtattgccagacagctctcttttggttcccattccaaatgtgctgctgtccttctttgcatttcacaatatcaaagaaaccaccacccttcttcctaacagcattttatgccttttattccacattaaatgggaattgtgcctacttaggagtgcccctccaattaattacatgtgtccaagaataatccaagctagagacacaaggtgggaaaacatttcaaaaaaaaaaagtcctcttaaggccagtaatttatctgaaaaggtattttatcacaccttgacaccttatatatgagcctattaggagctgcaggtggtttcatagggtaaaatccaagaaaagagaaggatgtgtggggtttctattagaagataattttgttctcattttaccttttcttttatgatccttctctgctagaacaggttaattctccaaatttgttttgttttgttttgttattttttagggaactcttttgcaaaagcaatggtcggatgtaaataacatttaaagtatagtgcacataacttccccggactgttccaatctgataatttgtaaatgctttagagtttttttaattaacacttgtgttgctaaattctatttatgtaagtctgctaaagttttttagcccacttaaaacttaagacaaccatttaaaataatggatgggttactatgagcaatttcgctttcagaacccccttgttttagtatatgaaaaagcctaatgcgcattaatgaggttgaagagactatgagaaatatgtatagtgtatattttaaaacagctttgcttgtattgtgaagatttaaaaacaaacttgagatttttaacgtaactattaacacagttttaacataagttatcccactgggtttaagagcatcttgaatgtataatcctttttgtaacccaggttggtttctacttttaccagtcacccaaacatatttatgtttttagttttatgtactcatttccctttgttttcctcaaacagcatgatttttttgcacatgtagaaattttttaaaagaaagaaattagtacatcattttctctggattttcttcacttccctcttcctttctactaactccttccttaaaggccatatcactccatttgcattatttgtgcaaatgccagggttggtttttatttttatttttgctatttacctaaaaaaagaaaatgcttcagtcaattgcttttttatttaaaaaaaaaaagaaaaaaagctgtaaccttatcatttctgagtagaccattgagcgatgaatgcacacctgtagtagcccaggaccagctgtggtggctaaagggaatatgttaattaagcaagaggttcttttctaaaagtggtatctgttatccacaatgtattttagttattcccacaagtcaggggtccagataaaatgagggttatcagctaactgatatgctatcattgaggttcatcaatgaatttgtacatttctagttccctttggtgaagggaaaaatgatgattttgcaagacctagattttggcttggtttcttgcctccttttttggcagccttcatcttctcatctcccaaaccccctgagcccgtagggttttcatagtggacaaagaacttgtggtcttttaaaactgggactgatacttttttgagagagtatcgtgtcgaaagtgtgatgttctaccactttaccaataactaattttaaatacacattgtcctctcgatttttggaccaaacagacgctcacagtggaggcttatcaagggttgcattggggaagaagcctctccctctctgtcagcaccagctggtaaaggtgactgtacagatgtgcattttccttttggtataaatggtccacagcactaactggtaaggcttattgtacagtatattgtcagtattcttctggttcagcataccttatagttcatatataacctgtattaattgtatagattgtgcattaaaagctgttaccaagttgtcagaacataagagcgaaaacaaggtcatatgtaatattttgtttgtaagtatcctttgtatcatagcaaaggaaatgtttaaaaaaatcaactgtaataaagtaattttagtacacaaaaaaaaaaaaaaaa

SEQ ID NO: 196 - protein, 419 aa, Homo sapiens
MGPLSAPPCTQHITWKGLLLTASLLNFWNPPTTAQVTIEAQPPKVSEGKDVLLLVHNLPQNLTGYIWYKGQIRDLYHYVTSYIVDGQIIKYGPAYSGRETVYSNASLLIQNVTQEDTGSYTLHIIKRGDGTGGVTGRFTFTLYLETPKPSISSSNFNPREATEAVILTCDPETPDASYLWWMNGQSLPMTHSLQLSETNRTLYLFGVTNYTAGPYECEIRNPVSASRSDPVTLNLLPKLPKPYITINNLNPRENKDVSTFTCEPKSENYTYIWWLNGQSLPVSPRVKRRIENRILILPSVTRNETGPYQCEIRDRYGGIRSDPVTLNVLYGPDLPRIYPSFTYYHSGQNLYLSCFADSNPPAQYSWTINGKFQLSGQKLSIPQITTKHSGLYACSVRNSATGKESSKSVTVRVSDWTLP

SEQ ID NO: 197 - DNA, 1989 bp, Homo sapiens
attcgggcctaggctcatctccacagaggagaacacgcagggagcagagaccatggggcccctctcagcccctccctgcacacagcatataacctggaaagggctcctgctcacagcatcacttttaaacttctggaacccgcccaccacagcccaagtcacgattgaagcccagccaccaaaagtttctgaggggaaggatgttcttctacttgtccacaatttgccccagaatcttactggctacatctggtacaaaggacaaatcagggacctctaccattatgttacatcatatgtagtagacggtcaaataattaaatatgggcctgcatacagtggacgagaaacagtatattccaatgcatccctgctgatccagaatgtcacccaggaagacacaggatcctacactttacacatcataaagcgaggtgatgggactggaggagtaactggacgtttcaccttcaccttatacctggagactcccaaaccctccatctccagcagcaatttcaaccccagggaggccacggaggctgtgatcttaacctgtgatcctgagactccagatgcaagctacctgtggtggatgaatggtcagagcctccctatgactcacagcttgcagctgtctgaaaccaacaggaccctctacctatttggtgtcacaaactatactgcaggaccctatgaatgtgaaatacggaacccagtgagtgccagccgcagtgacccagtcaccctgaatctcctcccgaagctgcccaagccctacatcaccatcaataacttaaaccccagggagaataaggatgtctcaaccttcacctgtgaacctaagagtgagaactacacctacatttggtggctaaatggtcagagcctcccggtcagtcccagggtaaagcgacgcattgaaaacaggatcctcattctacccagtgtcacgagaaatgaaacaggaccctatcaatgtgaaatacgggaccgatatggtggcatccgcagtgacccagtcaccctgaatgtcctctatggtccagacctccccagaatttacccttcgttcacctattaccattcaggacaaaacctctacttgtcctgctttgcggactctaacccaccggcacagtattcttggacaattaatgggaagtttcagctatcaggacaaaagctttctatcccccagattactacaaagcatagcgggctctatgcttgctctgttcgtaactcagccactggcaaggaaagctccaaatccgtgacagtcagagtctctgactggacattaccctgaattctactagttcctccaattccatcttctcccatggaacctcaaagagcaagacccactctgttccagaagccctataagtcagagttggacaactcaatgtaaatttcatgggaaaatccttgtacctgatgtctgagccactcagaactcaccaaaatgttcaacaccataacaacagctgctcaaactgtaaacaaggaaaacaagttgatgacttcacactgtggacagtttttcccaagatgtcagaataagactccccatcatgatgaggctctcacccctcttagctgtccttgcttgtgcctgcctctttcacttggcaggataatgcagtcattagaatttcacatgtagtataggagcttctgagggtaacaacagagtgtcagatatgtcatctcaacctcaaacttttacataacatctcaggaggaaatgtggctctctccatcttgcatacagggctcccaatagaaatgaacacagagatattgcctgtgtgtttgcagagaagatggtttctataaagagtaggaaagctgaaattatagtagagtcccctttaaatgcacattgtgtggatggctctcaccatttcctaagagatacattgtaaaacgtgacagtaagactgattctagcagaataaaacatgtactacatttgctaaa

SEQ ID NO: 198 - protein, 426 aa, Homo sapiens; identical to SEQ ID NO: 152

SEQ ID NO: 199 - DNA, 2144 bp, Homo sapiens
ggacagcactgctgagagctgtgctcaggaagcttctggatcctaggctcatctccacagaggagaacacacagacagcagagaccatggggctcctctcagcccctccctgcacacagcgcatcacctggaaggggctcctgctcacagcatcacttttaaacttctggaacccacccacgactgcccaagtcacgattgaagcccagccaaccaaagtttctgaggggaaggatgttcttctacttgtccacaatttgccccagaatcttactggctacatctggtacaaagggcaaatcagggacctctaccattacattacatcatatgtagtagacggtcaaataattatatatgggcctgcatacagtggacgagaaacaatatattccaatgcatccctgctgatccagaatgtcacccaggaagacgcaggatcctacaccttacacatcataatgggaggtgatgagaatagaggagtaactggacatttcaccttcaccttatatctggagactcccaagccctccatctccagcagcaaattaaaccccagggaggccatggaggctgtgagcttaacctgtgatcctgagactccggacgcaagctacctgtggtggatgaatggtcagagcctccctatgtctcacaggttgcagttgtctgaaaccaacaggaccctctttctattgggtgtcacaaagtacactgcaggaccctatgaatgtgaaatacggaacccagtgagtgccagccgcagtgacccattcaccctgaatctcctcccgaagctgcccaagccctacatcaccatcaacaacttaaaacccagggagaataaggatgtcttaaacttcacctgtgaacctaagagtgagaactacacctacatttggtggctaaatggtcagagcctcccggtcagtcccagggtaaagcgacccattgaaaacaggatcctcattctacccagtgtcacgagaaatgaaacaggaccctatcaatgtgaaataagggaccaatatggtggcatccgcagttacccagtcaccctgaatgtcctctatggtccagacctccccagaatttacccttcattcacctattaccgttcaggagaagtcctctacttgtcctgttctgcggactctaacccaccggcacagtattcttggacaattaatgggaagtttcagctatcaggacaaaagctctttatcccccaaattactacaaagcatagcgggctctatgcttgctctgttcgtaactcagccactggcaaggaaagctccaaatccatgacagtaaaagtctctgactggacattaccctgaattctactagttcctccaattccattttcttccatggaatcgctaagaaaaagacccactctgttccagaagccctataagctggaggtggacaactcaatgtaaatttcatgggaaaacccttgtacctgaagcgtgagccactcagaactcactaaaatgttcgacaccataacaacagatgctcaaactgtaaaccaggacaacaagtggatgacttcacactgtggacagtttttcccaagatgtcagaacaagactccccatcatgatgaggctctcacccctcttaactgtccttgctcatgcctgcctctttcacttggcaggataatgcagtcattagaatttcacatgtagtagcttctgagggtaacaatagagtgtcagatatgtcatctcaacccaaacttttacataacatctcagggggaaatgtggctctctccaccttgcatacaggactcccaatagaaatgaacacagagatattgcccgtgtgtttgcagataagatggtttctatgaagaggtaggaaagctgaaattataatagagtcccctttaaatgcacattctgtggatggctctcgccatttcctaagagatacattgtaaaatgtgacagtaatactgattctagcagaataaaacatgtaccacatttgctaatacaaaaaaaaaaaaaaaaaaaaaaaaaaaaaaaaaaaaaaaaaaaaaaaaaaaaaaaaaaaaaaaaaaaaaaaaaaaaaaaaaaaaaaaaaaaaaaaaaaaaaaaaaaaaaaaaaaaaaaaaaaaa

SEQ ID NO: 200 - protein, 426 aa, Homo sapiens
MGPLPAPSCTQRITWKGLLLTASLLNFWNPPTTAEVTIEAQPPKVSEGKDVLLLVHNLPQNLPGYFWYKGEMTDLYHYIISYIVDGKIIIYGPAYSGRETVYSNASLLIQNVTRKDAGTYTLHIIKRGDETREEIRHFTFTLYLETPKPYISSSNLNPREAMEAVRLICDPETLDASYLWWMNGQSLPVTHRLQLSKTNRTLYLFGVTKYIAGPYECEIRNPVSASRSDPVTLNLLPKLPIPYITINNLNPRENKDVLAFTCEPKSENYTYIWWLNGQSLPVSPGVKRPIENRILILPSVTRNETGPYQCEIQDRYGGLRSNPVILNVLYGPDLPRIYPSFTYYRSGENLDLSCFTESNPPAEYFWTINGKFQQSGQKLFIPQITRNHSGLYACSVHNSATGKEISKSMTVKVSGPCHGDLTESQS

SEQ ID NO: 201 - DNA, 1731 bp, Homo sapiens
agaaggaggaaggacagcacagctgacagccgtgctcagacagcttctggatcccaggctcatctccacagaggagaacacacaggcagcagagaccatggggcccctcccagccccttcctgcacacagcgcatcacctggaaggggctcctgctcacagcatcacttttaaacttctggaacccgcccaccactgccgaagtcacgattgaagcccagccacccaaagtttctgaggggaaggatgttcttctacttgtccacaatttgccccagaatcttcctggctacttctggtacaaaggggaaatgacggacctctaccattacattatatcgtatatagttgatggtaaaataattatatatgggcctgcatacagtggaagagaaacagtatattccaacgcatccctgctgatccagaatgtcacccggaaggatgcaggaacctacaccttacacatcataaagcgaggtgatgagactagagaagaaattcgacatttcaccttcaccttatacttggagactcccaagccctacatctccagcagcaacttaaaccccagggaggccatggaggctgtgcgcttaatctgtgatcctgagactctggacgcaagctacctatggtggatgaatggtcagagcctccctgtgactcacaggttgcagctgtccaaaaccaacaggaccctctatctatttggtgtcacaaagtatattgcaggaccctatgaatgtgaaatacggaacccagtgagtgccagtcgcagtgacccagtcaccctgaatctcctcccgaagctgcccatcccctacatcaccatcaacaacttaaaccccagggagaataaggatgtcttagccttcacctgtgaacctaagagtgagaactacacctacatttggtggctaaacggtcagagcctccccgtcagtcccggggtaaagcgacccattgaaaacaggatactcattctacccagtgtcacgagaaatgaaacaggaccctatcaatgtgaaatacaggaccgatatggtggcctccgcagtaacccagtcatcctaaatgtcctctatggtccagacctccccagaatttacccttcattcacctattaccgttcaggagaaaacctcgacttgtcctgcttcacggaatctaacccaccggcagagtatttttggacaattaatgggaagtttcagcaatcaggacaaaagctctttatcccccaaattactagaaatcatagcgggctctatgcttgctctgttcataactcagccactggcaaggaaatctccaaatccatgacagtcaaagtctctggtccctgccatggagacctgacagagtctcagtcatgactgcaacaactgagacactgagaaaaagaacaggctgataccttcatgaaattcaagacaaagaagaaaaaaactcaatgttattggactaaataatcaaaaggataatgttttcataattttttattggaaaatgtgctgattctttgaatgttttattctccagatttatgaactttttttcttcagcaattggtaaagtatacttttataaacaaaaattgaaatatttgcttttgctgtctatctgaatgccccagaattgtgaaactattcatgagtattcataggtttatggtaataaagttatttgcacatgttccaaaaaaaaaaaaaaaaaaaaaaaaaaaaaa

SEQ ID NO: 202 - protein, 426 aa, Homo sapiens [sequence omitted]

SEQ ID NO: 203 - DNA, 1678 bp, Homo sapiens; identical to SEQ ID NO: 149

SEQ ID NO: 204 - DNA, 82 bp, Homo sapiens
agggggcgagggattggagagaaaggcagttcctgatggtcccctccccaggggctggctttcctctggtccttccctccca

SEQ ID NO: 205 - DNA, 127 bp, Homo sapiens
ggatgccacattcagccattcagtgtgcagtgcctttcacagggaggtgtcatttatgtgaactaaaatataaatttcacctttctgagaagggtaatgtacagcatgcactgcatatgtggtgtcc

SEQ ID NO: 206 - DNA, 25 bp, Homo sapiens
gattgtgtttttgaggagaaaattt

SEQ ID NO: 207 - DNA, 25 bp, Homo sapiens
ctcccactaaccctaactacaactc

SEQ ID NO: 208 - DNA, 24 bp, Homo sapiens
aattttaggattttgagggatgat

SEQ ID NO: 209 - DNA, 25 bp, Homo sapiens
aaaccctctatctaaaataaaaccc

SEQ ID NO: 210 - protein, 215 aa, Homo sapiens [sequence omitted]

SEQ ID NO: 211 - DNA, 5030 bp, Homo sapiens
tttctgcggagggattacgctgacgaaagagacctgcttgcgcgtcgctgttccgtggtccgcgcgagcgtggtcgggagccgctggttcctggggtgacccgcggaggtgggagagggaagggcttccgaagccggcgggggtgccatggaccctctccgccggcgcggccttcacagctgggccgcgccgggcatccgtagtccgctctcccaaagcctcggtggagctgaagctgccacagagtgcatgttcacaaagggtcatcacacacggagctgcccctccctgtctccctagagcccatcttcgaggccaggggcttttctaccaggattctggggtgtttctcctcctttcctccctcccagatcttctcacggtaaggggagcagcgaaagcgcagggactttgcattccacgacccgttctgactagtcaacagccgatctgtccctgctgctctaattccagctgccctgccttgttttaacttcagagaaagggggagttctcatttgataagtttaagcctttgctttcgtaggaaggtcatgtggcttaagggacatcgtgaccgcgtatgctatttctgcctgtgcattctaaatcttgggggcagcatattccagaagtccttttggtcgattggttctgtgtcctaggataacaatttgtagtttctgaccatttctttacagaaaaaccacaattggtattttggactgcggggttttttagtggtctcaaactaaatgattatattctggaataatgctgacaatttggatagggtggtgtggaggaaacaagtctcgtgtagaagaaattatttagtaaaaaggattttagtttttggtacttctgaatgcaaatggccaaggaatccagcagtttgttggggtttctccagacaaaaataggctgaaaaataactaaacatgggcaaaggagatcctaagaagccgagaggcaaaatgtcatcatatgcattttttgtgcaaacttgtcgggaggagcataagaagaagcacccagatgcttcagtcaacttctcagagttttctaagaagtgctcagagaggtggaagaccatgtctgctaaagagaaaggaaaatttgaagatatggcaaaagcggacaaggcccgttatgaaagagaaatgaaaacctatatccctcccaaaggggagacaaaaaagaagttcaaggatcccaatgcacccaagaggcctccttcggccttcttcctcttctgctctgagtatcgcccaaaaatcaaaggagaacatcctggcctgtccattggtgatgttgcgaagaaactgggagagatgtggaataacactgctgcagatgacaagcagccttatgaaaagaaggctgcgaagctgaaggaaaaatacgaaaaggatattgctgcatatcgagctaaaggaaagcctgatgcagcaaaaaagggagttgtcaaggctgaaaaaagcaagaaaaagaaggaagaggaggaagatgaggaagatgaagaggatgaggaggaggaggaagatgaagaagatgaagatgaagaagaagatgatgatgatgaataagttggttctagcgcagttttttttttcttgtctataaagcatttaacccccctgtacacaactcactccttttaaagaaaaaaattgaaatgtaaggctgtgtaagatttgtttttaaactgtacagtgtctttttttgtatagttaacacactaccgaatgtgtctttagatagccctgtcctggtggtattttcaatagccactaaccttgcctggtacagtatgggggttgtaaattggcatggaaatttaaagcaggttcttgttggtgcacagcacaaattagttatatatggggatggtagttttttcatcttcagttgtctctgatgcagcttatacgaaataattgttgttctgttaactgaataccactctgtaattgcaaaaaaaaaaaaaaagttgcagctgttttgttgacattctgaatgcttctaagtaaatacaattttttttattagtattgttgtccttttcataggtctgaaatttttcttcttgaggggaagctagtcttttgcttttgcccattttgaatcacatgaattattacagtgtttatcctttcatatagttagctaataaaaagcttttgtctacacaccctgcatatcataatgggggtaaagttaagttgagatagttttcatccataactgaacatccaaaatcttgatcagttaagaaatttcacatagcccacttacatttacaaactgaagagtaatcaatctactcaaagcatgggattattagaatcaaacattttgaaagtctgtccttgaaggactaatagaaaagtatgttctaacctttacatgaggactctattctttaactcccattaccatgtaatggcagttatattttgcagttcccacattaaagaagacctgagaatgtatccccaaaagcgtgagcttaaaatacaagactgccatattaaattttttgttgacattagtctcagtgaagactatgaaaatgctggctatagatgtcttttcccatttatctaaatatggactgctcaggaaacgagactttccattacaagtatttttaattaattgggccagcttttcaaacaaagatgccacattcaaaatagggtatattttcctatattacggtttgcccctttataaatccaagtagataggaagaaagaagacaaactttgcatctcagtatgaattattcaatttatttgaatgatttttctttacaaaacaaactcattcattagtcatgtttatctgcttaggagtttagggaacaatttggcaattttgtggttttcgagattatcgttttcttaaagtgccagtattttaaaatagcgttcttgtaattttacacgcttttgtgatggagtgctgttttgttatataatttagacttggattctttccatttgcatttgtttatgtaatttcaggaggaatactgaacatctgagtcctggatgatactaataaactaataattgcagaggttttaaatactagttaaatggctttcacttaagaacttaagattttgttacatatttttaaatcttgtttctaataatacctcttagcagtaccttttaaataagtataagggatggcaaagtttttccctttaaaaatactcactttatgcttataaataggttaatgggctgataaaaggttttgtcaaacattgcaagtattcggtgctatatataaaggaggaaaaactagttttactttcagaatgatttaaacaagatttttaaaaacaagatacatgcaagcgaacagcagggttagtgataggctgcaattgtgtcgaacatcagattttttgttaagaggagcaaatgactcaatctgatttagatggaagtttctactgtatagaaatcaccattaatcaccaacattaataattctgatccatttaaaatgaattctggctcaaggagaatttgtaactttagtaggtacgtcatgacaactaccatttttttaagatgttgagaatgggaacagtttttttagggtttattcttgaccacagatcttaagaaaatggacaaaacccctcttcaatctgaagattagtatggtttggtgttctaacagtatcccctagaagttggatgtctaaaactcaagtaaatggaagtgggaggcaatttagataagtgtaaagccttgtaactgaagatgattttttttagaaagtgtatagaaactattttaatgccaagatagttacagtgctgtggggtttaaagactttgttgacatcaagaaaagactaaatctataattaattgggccaacttttaaaatgaagatgctttttaaaactaatgaactaagatgtataaatcttagtttttttgtattttaaagataggcatatggcatattgattaacgagtcaaatttcctaactttgctgtgcaaaggttgagagctattgctgattagttaccacagttctgatgatcgtcccatcacagtgttgttaatgtttgctgtatttattaattttcttaaagtgaaatctgaaaaatgaaatttgtgtgtcctgtgtacccgaggggtaatgattaaatgataaagataagaaaagcgcccatgtaacacaaactgccattcaacaggtatttcccttactacctaaggaattgtaaccattgctcagacattgtaggatttaactatgttgaaaactacaggagaggccgggcgcagtggctcacgcctgtaatcccagcactttgggaggccaaggcgggcagatcacgaggtcaggagattgagaccatcctggctaacgtggtgaaaccccgcctctactaaaaatacaaaaaattagccaagcgtggtgctgggcgcctgtagtcccagtaactcaggaggctgaggcaggagaatggcgtgaacccgggaggcggaggttgcagtgagccgagattgtgccactgcactccagcctgggtgacagagcaagactccatctcaaaaaaaaaaaaaaaacacaggagagacaactggtttttgaatgaaatacatgggtactgccttgcttgacatcacatagtccttgatgaaagttcacatttaggtctgcttggtacaatacgcctcctaaaaaggtccttgatgaaagttcacatttaggtctgcttggtacaacacgcctcctgaaagggtctgatagctttcagtagcagtaagacacttgcatgtgatggtaaggtatctgcaaatttgcacacaccgtacacagcttaagtcttagaattaacttgctaaaatgtgagcctttggtaattaggctgttttattagggagtgtgataatatttgaatttcttttcatatttgtgctttgtgtcattttcaaatgacccttgaaatgtattttaaaagtagataaaagccagaaagtga

1. A method of determining whether inhibition of cytotoxic T-lymphocyte-associated protein 4 (CTLA4) in a subject with melanoma will result in clinical benefit in the subject comprising:
obtaining a test sample from a subject having or at risk of developing melanoma;
determining the expression level of at least one melanoma-associated gene in the test sample;
comparing the expression level of the melanoma-associated gene in the test sample with the expression level of the melanoma-associated gene in a reference sample; and
determining whether CTLA4 blockade will inhibit melanoma in the subject if the expression level of the melanoma-associated gene in the test sample is differentially expressed as compared to the level of the melanoma-associated gene in the reference sample; or
a method of determining whether inhibition of CTLA4 in a subject with melanoma will result in clinical benefit in the subject comprising:
obtaining a test sample from a subject having or at risk of developing melanoma;
determining the expression level of at least one melanoma-associated gene in the test sample;
comparing the expression level of the melanoma-associated gene in the test sample with the expression level of a housekeeping gene in a reference sample; and
determining whether CTLA4 blockade will inhibit melanoma in the subject if the expression level of the melanoma-associated gene in the test sample is differentially expressed as compared to the level of the housekeeping gene in the reference sample; or
a method to predict a response of a subject with cancer to a CTLA4 therapy, the method comprising:
(a) assaying for
(i) aberrant expression of at least one resistant cancer-associated gene or miRNA in a biological sample from the subject, wherein the aberrant expression of the at least one resistant cancer-associated gene or miRNA is not present in the biological sample, or
(ii) aberrant expression of at least one beneficial cancer-associated gene or miRNA in a
biological sample from the subject, wherein the aberrant expression of the at least one beneficial cancer-associated gene or miRNA is present in the biological sample, and
(b) predicting a response of the subject with cancer to a CTLA4 therapy to be positive based on the assaying.

2. The method of claim 1, wherein the test sample is obtained from the melanoma tissue or from the tumor microenvironment or from tumor-infiltrating immune cells.

3. The method of claim 1, wherein clinical benefit in the subject comprises complete or partial response as defined by response evaluation criteria in solid tumors (RECIST), stable disease as defined by RECIST, or long-term survival in spite of disease progression or response as defined by irRC criteria.

4. The method of claim 1, wherein the test sample is obtained from the melanoma, and wherein the melanoma-associated gene comprises a gene on chromosome Xq28.

5. The method of claim 1, wherein the test sample is obtained from the melanoma, wherein the melanoma-associated gene comprises a cancer germline antigen (CGA) gene; and
determining that inhibition of CTLA4 in a subject with melanoma will not result in clinical benefit in the subject if the expression level of the CGA gene in the test sample is higher than the level of the CGA gene in the reference sample.

6. The method of claim 5, wherein the CGA gene comprises melanoma-associated antigen 2 (MAGEA2), MAGEA3, MAGEA6, MAGEA12, chondrosarcoma associated gene 1 (CSAG1), CSAG2, CSAG3 or CSAG4.

7. The method of claim 6, wherein the CGA gene is hypomethylated.

8.-9. (canceled)

10. The method of claim 1, wherein the test sample is obtained from the melanoma, wherein the melanoma-associated gene comprises a pregnancy-specific glycoprotein (PSG) gene, a γ-aminobutyric acid (GABA) A receptor gene, an epithelial-to-mesenchymal transition gene, an embryonic development/differentiation gene, an angiogenesis gene, or an extracellular matrix (ECM) gene; and
determining that inhibition of CTLA4 in a subject with melanoma will not result in clinical benefit in the subject if the expression level of the PSG gene, GABA A receptor gene, epithelial-to-mesenchymal transition gene, embryonic development/differentiation gene, angiogenesis gene, or extracellular matrix gene in the test sample is higher than the level of the corresponding gene in the reference sample.

11.-12. (canceled)

13. The method of claim 10, wherein the GABA A receptor gene comprises gamma-aminobutyric acid type A receptor alpha 3 subunit (GABRA3), gamma-aminobutyric acid type A receptor beta 1 subunit (GABRB1), GABRB2, gamma-aminobutyric acid type A receptor gamma 2 subunit (GABRG2), gamma-aminobutyric acid type A receptor theta subunit (GABRQ), or gamma-aminobutyric acid type A receptor rho 1 subunit (GABRR1).

14. The method of claim 10, wherein the epithelial-to-mesenchymal transition gene comprises claudin 1 (CLDN1), CLDN2, eyes absent homolog 1 (EYA1), snail family zinc finger 1 (SNAI1), transforming growth factor beta 2 (TGFB2), or wingless-type MMTV integration site family member 3 (WNT3).

15.-17. (canceled)

18. The method of claim 1, wherein the test sample is obtained from the melanoma, wherein the melanoma-associated gene comprises MAGEA2, CSAG4, MAGEA2B, RP11-215P9, MAGEA12, CSAG1, GABRA3, CSAG3, makorin ring finger protein 9 (MKRN9P), keratin 8 pseudogene 8 (KRT8P8), MAGEA6, EYA1, CSAG2, RP11-379D21.3, MAGEC1, RP1-273G13.1, MAGEA3, miR-218-1, PSG11, X-inactive specific transcript (XIST), RP11-360D2.1, pregnancy specific beta-1-glycoprotein 10 pseudogene (PSG10P), miR-1262, tachykinin 3 (TAC3), PSG8, heat shock protein family B (small) member 3 (HSPB3), gap junction protein beta-6 (GJB6), PSG6, GABRQ, MAGEA1, MAGEA11 or MAGEA9B; and
determining that inhibition of CTLA4 in a subject with melanoma will not result in clinical benefit in the subject if the expression level of the melanoma-associated gene in the test sample is higher than the level of the corresponding gene in the reference sample.

19. The method of claim 1, wherein the test sample is obtained from the melanoma, and wherein the melanoma-associated gene comprises micro ribonucleic acid-211 (miR-211), miR-513A2, miR-185, or TRPM1; and
determining that inhibition of CTLA4 in a subject with melanoma will result in clinical benefit in the subject if the expression level of miR-211, miR-513A2, miR-185, or TRPM1 in the test sample is higher than the level of miR-211, miR-513A2, miR-185, or TRPM1, respectively, in the reference sample.

20. The method of claim 1, wherein the test sample is obtained from the melanoma, and wherein the melanoma-associated gene comprises transient receptor potential cation channel subfamily M member 1 (TRPM1); and
determining that inhibition of CTLA4 in a subject with melanoma will result in clinical benefit in the subject if the expression level of TRPM1 in the test sample is higher than the level of TRPM1 in the reference sample.

21. The method of claim 1, wherein the test sample is obtained from the melanoma or the infiltrating immune cells, and wherein the melanoma-associated gene comprises miR-211, MAGEA2, MAGEA3, MAGEA6, MAGEA12, CSAG1, CSAG2, CSAG3, CSAG4; and
determining that inhibition of CTLA4 in a subject with melanoma will not result in clinical benefit in the subject if the expression level of miR-211 in the test sample is lower than the level of miR-211 in the reference sample and if the expression level of MAGEA2, MAGEA3, MAGEA6, MAGEA12, CSAG1, CSAG2, CSAG3, and CSAG4 in the test sample is higher than the level of the corresponding gene in the reference sample.

22. The method of claim 1, wherein the test sample is obtained from the melanoma, and wherein the melanoma-associated gene comprises miR-211 and one or more of CD2, CD6, CXCL13, CD3D, CD3E, CD3G, LCK, T cell receptor alpha gene, T cell receptor beta gene, CD28, ICOS, EOMES, IL2RB, FASLG, SLAMF6, GNLY, GZMA, GZMB, GZMH, GZMK, PRF1, PTCRA, CD19, CD72, FCRL1/3, MS4A1, CTLA4, LAG3, FCRL1, FCRL3, CD5L, SIGLEC8, or FAIM3/TOSO; and
determining that inhibition of CTLA4 in a subject with melanoma will result in clinical benefit in the subject if the expression level of the melanoma-associated genes in the test sample is higher than the level of the gene in the reference sample.

23. The method of claim 1, wherein the test sample is obtained from the melanoma and the melanoma-associated gene comprises CD2, CD6, CXCL13, CD3D, CD3E, CD3G, LCK, T cell receptor alpha gene, T cell receptor beta gene, CD28, ICOS, EOMES, IL2RB, FASLG, SLAMF6, GNLY, GZMA, GZMB, GZMH, GZMK, PRF1, PTCRA, CD19, CD72, FCRL1/3, MS4A1, CTLA4, LAG3, FCRL1, FCRL3, CD5L, SIGLEC8, or FAIM3/TOSO; and
determining that inhibition of CTLA4 in a subject with melanoma will result in clinical benefit in the subject if the expression level of the melanoma-associated gene in the test sample is higher than the level of the melanoma-associated gene in the reference sample.

24. The method of claim 1, wherein the test sample is obtained from a melanoma tumor microenvironment, wherein the melanoma-associated gene comprises a T cell infiltration-associated gene, a receptor signaling gene, an activation gene, a cytotoxicity gene, a humoral immunity gene, or an immune inhibitory receptor gene; and
determining that inhibition of CTLA4 in a subject with melanoma will result in clinical benefit in the subject if the expression level of the melanoma-associated gene in the test sample is higher than the level of the gene in the reference sample.

25.-52. (canceled)

53. A composition for predicting no clinical benefit in response to CTLA4 therapy comprising a melanoma-associated gene, wherein the melanoma-associated gene comprises MAGEA2, MAGEA3, MAGEA6, MAGEA12, CSAG1, CSAG2, CSAG3, or CSAG4 synthesized complementary deoxyribonucleic acid (cDNA; or
a composition for predicting clinical benefit in response to CTLA4 therapy comprising miR-211 and a melanoma-associated gene selected from the group consisting of CD5L, IL12RB2, FAIM3, PTCRA, CD2, CD6, CXCL13, CD3D, CD3E, CD3G, LCK, T cell receptor alpha gene, T cell receptor beta gene, GNLY, GZMA, GZMB, GZMH, GZMK, PRF1, CD19, CD72, FCRL1/3, MS4A1, CTLA4, LAG3, FCRL1, FCRL3, SIGLEC8, and FAIM3/TOSO synthesized cDNA, or
a kit, comprising reagents for assaying a biological sample from a subject with cancer for:
(a) aberrant expression of at least one resistant cancer-associated gene or miRNA, or
(b) aberrant expression of at least one beneficial cancer-associated gene or miRNA.

54.-58. (canceled)

59. A method of treating cancer in a subject in need thereof, comprising: administering a therapeutically effective amount of one or more CTLA4 inhibitor agents to the subject, wherein the subject is identified as
(a) not having aberrant expression of at least one resistant cancer-associated gene or miRNA, or
(b) having aberrant expression of at least one beneficial cancer-associated gene or miRNA; or
a method of treating cancer in a subject in need thereof, comprising:
(a) analyzing a biological sample from the subject for:
(i) aberrant expression of at least one resistant cancer-associated gene or miRNA, wherein the aberrant expression of the at least one resistant cancer-associated gene or miRNA is not present in the biological sample, or
(ii) aberrant expression of at least one beneficial cancer-associated gene or miRNA, wherein the aberrant expression of the at least one beneficial cancer-associated gene or miRNA is present in the biological sample;
(b) identifying the subject as a candidate for receiving one or more CTLA4 inhibitor agents; and
(c) administering a therapeutically effective amount of the one or more CTLA4 inhibitor agents to the subject;
a method of treating cancer comprising administering an effective amount of a CTLA4 inhibitor and an effective amount of a HMGB1 receptor agonist; or
a method of treating cancer comprising administering an effective amount of a CTLA4 inhibitor and an effective amount of a Xg28-CGA antagonist; or
a method of treating cancer comprising administering an effective amount of a CTLA4 inhibitor and an effective amount of an agonist or inducer of autophagy; or
a method of treating cancer comprising administering an effective amount of a CTLA4 inhibitor and an effective amount of a agonist or inducer of miR-211, miR-185 and/or miR-513A2; or
a method of identifying a subject with cancer as a candidate for receiving one or more CTLA4 inhibitor agents, comprising:
(a) analyzing a biological sample from the subject for:
(i) aberrant expression of at least one resistant cancer-associated gene or miRNA, wherein the aberrant expression of the at least one resistant cancer-associated gene or miRNA is not present in the biological sample, or
(ii) aberrant expression of at least one beneficial cancer-associated gene or miRNA, wherein the aberrant expression of the at least one beneficial cancer-associated gene or miRNA is present in the biological sample; and
(b) identifying the subject as a candidate for receiving one or more ctla4 inhibitor agents.

60.-69. (canceled)

70. A method of determining whether administration of a CTLA4 inhibitor and a HMGB1 receptor agonist to a subject with melanoma will result in clinical benefit in the subject comprising:
obtaining a test sample from a subject having or at risk of developing melanoma;
determining the expression level of at least one melanoma-associated gene in the test sample;
comparing the expression level of the melanoma-associated gene in the test sample with the expression level of the melanoma-associated gene in a reference sample; and
determining whether administration of a CTLA4 inhibitor and a HMGB1 receptor agonist will inhibit melanoma in the subject if the expression level of the melanoma-associated gene in the test sample is differentially expressed as compared to the level of the melanoma-associated gene in the reference sample; or
a method of determining whether administration of a CTLA4 inhibitor and a Xq28-CGA antagonist to a subject with melanoma will result in clinical benefit in the subject comprising:
obtaining a test sample from a subject having or at risk of developing melanoma;
determining the expression level of at least one melanoma-associated gene in the test sample;
comparing the expression level of the melanoma-associated gene in the test sample with the expression level of the melanoma-associated gene in a reference sample; and
determining whether administration of a CTLA4 inhibitor and Xg28-CGA antagonist will inhibit melanoma in the subject if the expression level of the melanoma-associated gene in the test sample is differentially expressed as compared to the level of the melanoma-associated gene in the reference sample; or
a method of determining whether administration of a CTLA4 inhibitor and an autophagy agonist to a subject with melanoma will result in clinical benefit in the subject comprising:
obtaining a test sample from a subject having or at risk of developing melanoma;
determining the expression level of at least one melanoma-associated gene in the test sample;
comparing the expression level of the melanoma-associated gene in the test sample with the expression level of the melanoma-associated gene in a reference sample; and
determining whether administration of a CTLA4 inhibitor and an autophagy agonist will inhibit melanoma in the subject if the expression level of the melanoma-associated gene in the test sample is differentially expressed as compared to the level of the melanoma-associated gene in the reference sample;
a method of determining whether administration of a CTLA4 inhibitor and a miR-211, miR-185 and/or miR-513A2 agonist to a subject with melanoma will result in clinical benefit in the subject comprising:
obtaining a test sample from a subject having or at risk of developing melanoma;
determining the expression level of at least one melanoma-associated gene in the test sample;
comparing the expression level of the melanoma-associated gene in the test sample with the expression level of the melanoma-associated gene in a reference sample; and
determining whether administration of a CTLA4 inhibitor and an miR-211, miR-185 and/or miR-513A2 agonist will inhibit melanoma in the subject if the expression level of the melanoma-associated gene in the test sample is differentially expressed as compared to the level of the melanoma-associated gene in the reference sample.

71.-92. (canceled)
